United States Patent Application Publication US 2006/0248617 A1 - sequence listing, part 3

SEQ ID NO: 1101 - protein, 178 aa, Thermococcus kodakaraensis KOD1
  misc_feature (321437)..(321437): n is a or c or g or t.
  misc_feature (527833)..(527833): n is a or c or g or t.
  misc_feature (527901)..(527901): n is a or c or g or t.
  misc_feature (527978)..(527978): n is a or c or g or t.
  misc_feature (960838)..(960839): n is a or c or g or t.
  misc_feature (960860)..(960861): n is a or c or g or t.
  misc_feature (960872)..(960873): n is a or c or g or t.
  misc_feature (960879)..(960879): n is a or c or g or t.
  misc_feature (960890)..(960890): n is a or c or g or t.
  misc_feature (1250239)..(1250239): n is a or c or g or t.
  misc_feature (1302432)..(1302434): n is a or c or g or t.
  misc_feature (1302471)..(1302471): n is a or c or g or t.
  misc_feature (1302488)..(1302488): n is a or c or g or t.
  misc_feature (1674836)..(1674836): n is a or c or g or t.
MSKIEIILDHEKAERIKKIRPTKDEYFMLIAKLVSLRATCPRLRVGAVAVKDGYILATGYNGAPRGMDHCIDVGCLIVDGHCHRAVHAEQNVIAMAARKGISLEGATLYVTHFPCDTCFKLLINAGIREIVYEEMYPNEATEILLREAQEKGIVKIRQFKLKKERVRLFLEELFGEDF

SEQ ID NO: 1102 - protein, 397 aa, Thermococcus kodakaraensis KOD1
  misc_feature (321437)..(321437): n is a or c or g or t.
  misc_feature (527833)..(527833): n is a or c or g or t.
  misc_feature (527901)..(527901): n is a or c or g or t.
  misc_feature (527978)..(527978): n is a or c or g or t.
  misc_feature (960838)..(960839): n is a or c or g or t.
  misc_feature (960860)..(960861): n is a or c or g or t.
  misc_feature (960872)..(960873): n is a or c or g or t.
  misc_feature (960879)..(960879): n is a or c or g or t.
  misc_feature (960890)..(960890): n is a or c or g or t.
  misc_feature (1250239)..(1250239): n is a or c or g or t.
  misc_feature (1302432)..(1302434): n is a or c or g or t.
  misc_feature (1302471)..(1302471): n is a or c or g or t.
  misc_feature (1302488)..(1302488): n is a or c or g or t.
  misc_feature (1674836)..(1674836): n is a or c or g or t.
MSIENTDVHPEGYDDYVTFLKRRIRQLELQVRTLEADKERLERELSRLRMEMSRLRQPPAFAGNVIEVLDDERAIVQNYNGPRFVVRIAPWIERDKLKPGARVALDQRTMAIVELLPSEKDPSVLGFEVIERPKVTYNDIGGLEKQLQELREAIELPLKHPELFEQVGIEPPKGVLLYGPPGCGKTLMAKAVANHVNATFIRVVGSELVRKFIGEGARLVHELFELAKEKAPTIIFIDEIDAIGAKRMDETTGGEREVNRTLMQLLAEMDGFDPRGNVKVIAATNRPDILDPALLRPGRFDRLIEVPLPDYQGRLEILKVHTRKMNLKGVDLRVIAEITEGASGADLKAIATEAGMFAIRDRRTYVTQDDFLKAVDKVIGSEKRLAQQIAMHEVMYG

SEQ ID NO: 1103 - protein, 166 aa, Thermococcus kodakaraensis KOD1
  misc_feature (321437)..(321437): n is a or c or g or t.
  misc_feature (527833)..(527833): n is a or c or g or t.
  misc_feature (527901)..(527901): n is a or c or g or t.
  misc_feature (527978)..(527978): n is a or c or g or t.
  misc_feature (960838)..(960839): n is a or c or g or t.
  misc_feature (960860)..(960861): n is a or c or g or t.
  misc_feature (960872)..(960873): n is a or c or g or t.
  misc_feature (960879)..(960879): n is a or c or g or t.
  misc_feature (960890)..(960890): n is a or c or g or t.
  misc_feature (1250239)..(1250239): n is a or c or g or t.
  misc_feature (1302432)..(1302434): n is a or c or g or t.
  misc_feature (1302471)..(1302471): n is a or c or g or t.
  misc_feature (1302488)..(1302488): n is a or c or g or t.
  misc_feature (1674836)..(1674836): n is a or c or g or t.
VRKVVIKYEPLNRKERIARLFREAIEAENQKDLETAKKKLDEILHESMEEEPELYFEACFRLADIFLQEDNYRGAVKCALRAIYNAPNDDLFRLGFKRLGDILTIIRDAGKELELTENMDSLRVLLKEDKLLSKFLEALIKAAKGEEVSVEFPVKEMNEALEALKG

SEQ ID NO: 1104 - protein, 203 aa, Thermococcus kodakaraensis KOD1
  misc_feature (321437)..(321437): n is a or c or g or t.
  misc_feature (527833)..(527833): n is a or c or g or t.
  misc_feature (527901)..(527901): n is a or c or g or t.
  misc_feature (527978)..(527978): n is a or c or g or t.
  misc_feature (960838)..(960839): n is a or c or g or t.
  misc_feature (960860)..(960861): n is a or c or g or t.
  misc_feature (960872)..(960873): n is a or c or g or t.
  misc_feature (960879)..(960879): n is a or c or g or t.
  misc_feature (960890)..(960890): n is a or c or g or t.
  misc_feature (1250239)..(1250239): n is a or c or g or t.
  misc_feature (1302432)..(1302434): n is a or c or g or t.
  misc_feature (1302471)..(1302471): n is a or c or g or t.
  misc_feature (1302488)..(1302488): n is a or c or g or t.
  misc_feature (1674836)..(1674836): n is a or c or g or t.
VDFSWVPYAVIGASIIVGTIWFTKYLGQEWAWVNRKLIHFSIVPAILMFYYGLIPKEVFAPAAFAFGLTQLWPHLKRSEFSWYQLQNNYGEVFFALSAAGISYFMPRNYSTALLLAMAISDGVTGIIRHHYFRRNGFNVKLKKHWTGSLGYLVTAVIIAIALLEGSTIGKIGWAFVLMLAEYQPWVDDNLAVPLVGSLLYFFY

SEQ ID NO: 1105 - protein, 213 aa, Thermococcus kodakaraensis KOD1
  misc_feature (321437)..(321437): n is a or c or g or t.
  misc_feature (527833)..(527833): n is a or c or g or t.
  misc_feature (527901)..(527901): n is a or c or g or t.
  misc_feature (527978)..(527978): n is a or c or g or t.
  misc_feature (960838)..(960839): n is a or c or g or t.
  misc_feature (960860)..(960861): n is a or c or g or t.
  misc_feature (960872)..(960873): n is a or c or g or t.
  misc_feature (960879)..(960879): n is a or c or g or t.
  misc_feature (960890)..(960890): n is a or c or g or t.
  misc_feature (1250239)..(1250239): n is a or c or g or t.
  misc_feature (1302432)..(1302434): n is a or c or g or t.
  misc_feature (1302471)..(1302471): n is a or c or g or t.
  misc_feature (1302488)..(1302488): n is a or c or g or t.
  misc_feature (1674836)..(1674836): n is a or c or g or t.
MPMKIIWYGHSCFWIETKGVKFLIDPYPEVDDDRIGDVDYILITHEHTDHYGKVELLSRLRDATVIGPKQVYLMAVADGVTKAREIDAGETIELENGVKVTAIYVEHPSSQYPLGYIIEGDKTVFHPGDTYSTPAFQRLRGKIDVLLVPISGRSTANEREAAQIIEDIRPKVVIPMHYGVYNDEDPSKLESELRKRRIWVRFIKPELYREIEV

SEQ ID NO: 1106 - protein, 220 aa, Thermococcus kodakaraensis KOD1
  misc_feature (321437)..(321437): n is a or c or g or t.
  misc_feature (527833)..(527833): n is a or c or g or t.
  misc_feature (527901)..(527901): n is a or c or g or t.
  misc_feature (527978)..(527978): n is a or c or g or t.
  misc_feature (960838)..(960839): n is a or c or g or t.
  misc_feature (960860)..(960861): n is a or c or g or t.
  misc_feature (960872)..(960873): n is a or c or g or t.
  misc_feature (960879)..(960879): n is a or c or g or t.
  misc_feature (960890)..(960890): n is a or c or g or t.
  misc_feature (1250239)..(1250239): n is a or c or g or t.
  misc_feature (1302432)..(1302434): n is a or c or g or t.
  misc_feature (1302471)..(1302471): n is a or c or g or t.
  misc_feature (1302488)..(1302488): n is a or c or g or t.
  misc_feature (1674836)..(1674836): n is a or c or g or t.
MLSTGTKSLDSLLGGGFAPGVLTQVYGPYASGKTTLALQTGLLSGKKVAYVDTEGGFSPERLVQMAETRGLNPEEALSRFILFTPSDFKEQRRVIGSLKKTVDSNFALVVVDSITAHYRAEENRSGLIAELSRQLQVLLWIARKHNIPVIVINQVHFDSRTEMTKPVAEQTLGYRCKDILRLDKLPKPGLRVAVLERHRFRPEGLMAYFRITERGIEDVE

SEQ ID NO: 1107 - protein, 310 aa, Thermococcus kodakaraensis KOD1
  misc_feature (321437)..(321437): n is a or c or g or t.
  misc_feature (527833)..(527833): n is a or c or g or t.
  misc_feature (527901)..(527901): n is a or c or g or t.
  misc_feature (527978)..(527978): n is a or c or g or t.
  misc_feature (960838)..(960839): n is a or c or g or t.
  misc_feature (960860)..(960861): n is a or c or g or t.
  misc_feature (960872)..(960873): n is a or c or g or t.
  misc_feature (960879)..(960879): n is a or c or g or t.
  misc_feature (960890)..(960890): n is a or c or g or t.
  misc_feature (1250239)..(1250239): n is a or c or g or t.
  misc_feature (1302432)..(1302434): n is a or c or g or t.
  misc_feature (1302471)..(1302471): n is a or c or g or t.
  misc_feature (1302488)..(1302488): n is a or c or g or t.
  misc_feature (1674836)..(1674836): n is a or c or g or t.
VDEVLYDRFGRPVTNLRISLTQECNYRCFFCHREGQRFLAKNELTPEEIERLVRIASRLGIRKVKLTGGEPTVREDILEIVKRIKPYVIDLSMTTNGSRLKELAKPLAKAGLDRVNVSLHSLKPEVYKRITGVDGLEAVLEGIEEAVKYLSPVKLNMTVMKGLNDGEIWDMVEFAAKTGTILQLIELEAPREMAETAFFRKYFYPLKPVEEKLEKLAVETKERRMHRRKKYFIPTDYGIAEVEVVRAMHNTVFCANCTRLRVTSDGKFKTCLLRNNDLIDFLSAMRNGASDEEIVEIFKRAVLMREPYWK

SEQ ID NO: 1108 - protein, 347 aa, Thermococcus kodakaraensis KOD1
  misc_feature (321437)..(321437): n is a or c or g or t.
  misc_feature (527833)..(527833): n is a or c or g or t.
  misc_feature (527901)..(527901): n is a or c or g or t.
  misc_feature (527978)..(527978): n is a or c or g or t.
  misc_feature (960838)..(960839): n is a or c or g or t.
  misc_feature (960860)..(960861): n is a or c or g or t.
  misc_feature (960872)..(960873): n is a or c or g or t.
  misc_feature (960879)..(960879): n is a or c or g or t.
  misc_feature (960890)..(960890): n is a or c or g or t.
  misc_feature (1250239)..(1250239): n is a or c or g or t.
  misc_feature (1302432)..(1302434): n is a or c or g or t.
  misc_feature (1302471)..(1302471): n is a or c or g or t.
  misc_feature (1302488)..(1302488): n is a or c or g or t.
  misc_feature (1674836)..(1674836): n is a or c or g or t.
VDNKIWRLAMVNPINFNGFIAGWLLLLGALIGIYRALYYYKRVPEPGKSLAKRTLISLLFFGLGSVSAIIDSLTPRPLWFLMVIFYTLSYAAILSTIFLSLRAVATSIEKPEGVKERSTAQKTPERNETREKELPLHGGYSLRKEPSAQLFHILKEVSSGLIVVSRKSREEWVEKFGVQPDEFLWLSRADVENSIDPSKLHVIQGKILQFMEQRGPVVVYFDGLEYLTLYNDFPAVAKFLFAVKDMVMIKNSLMLIHLPEGIFDKKQEIILLREFEEINEEELIKKLSQALSPERAEEIALFGVLPPATKSGDAKDASDKSPEEGGRATKEEAQEAEPLRREEKAKE

SEQ ID NO: 1109 - protein, 67 aa, Thermococcus kodakaraensis KOD1
  misc_feature (321437)..(321437): n is a or c or g or t.
  misc_feature (527833)..(527833): n is a or c or g or t.
  misc_feature (527901)..(527901): n is a or c or g or t.
  misc_feature (527978)..(527978): n is a or c or g or t.
  misc_feature (960838)..(960839): n is a or c or g or t.
  misc_feature (960860)..(960861): n is a or c or g or t.
  misc_feature (960872)..(960873): n is a or c or g or t.
  misc_feature (960879)..(960879): n is a or c or g or t.
  misc_feature (960890)..(960890): n is a or c or g or t.
  misc_feature (1250239)..(1250239): n is a or c or g or t.
  misc_feature (1302432)..(1302434): n is a or c or g or t.
  misc_feature (1302471)..(1302471): n is a or c or g or t.
  misc_feature (1302488)..(1302488): n is a or c or g or t.
  misc_feature (1674836)..(1674836): n is a or c or g or t.
VVGEVKWKERVKREEVRRIEEKLNRFDCRRILVVPDENVLERKPEGVEVLTPEDLVEIAKEGMERSI

SEQ ID NO: 1110 - protein, 118 aa, Thermococcus kodakaraensis KOD1
  misc_feature (321437)..(321437): n is a or c or g or t.
  misc_feature (527833)..(527833): n is a or c or g or t.
  misc_feature (527901)..(527901): n is a or c or g or t.
  misc_feature (527978)..(527978): n is a or c or g or t.
  misc_feature (960838)..(960839): n is a or c or g or t.
  misc_feature (960860)..(960861): n is a or c or g or t.
  misc_feature (960872)..(960873): n is a or c or g or t.
  misc_feature (960879)..(960879): n is a or c or g or t.
  misc_feature (960890)..(960890): n is a or c or g or t.
  misc_feature (1250239)..(1250239): n is a or c or g or t.
  misc_feature (1302432)..(1302434): n is a or c or g or t.
  misc_feature (1302471)..(1302471): n is a or c or g or t.
  misc_feature (1302488)..(1302488): n is a or c or g or t.
  misc_feature (1674836)..(1674836): n is a or c or g or t.
MPKSVRKALNIKEVPVLWITAAECSEGCVNPRRLEYLLHTLVNFMRREETPKLIYLDGLEYLVIENGFIPVYKFLSALKDYALITNTVILVPAEKASFNEREWNLLRREFESLQEKAE

SEQ ID NO: 1111 - protein, 883 aa, Thermococcus kodakaraensis KOD1
  misc_feature (321437)..(321437): n is a or c or g or t.
  misc_feature (527833)..(527833): n is a or c or g or t.
  misc_feature (527901)..(527901): n is a or c or g or t.
  misc_feature (527978)..(527978): n is a or c or g or t.
  misc_feature (960838)..(960839): n is a or c or g or t.
  misc_feature (960860)..(960861): n is a or c or g or t.
  misc_feature (960872)..(960873): n is a or c or g or t.
  misc_feature (960879)..(960879): n is a or c or g or t.
  misc_feature (960890)..(960890): n is a or c or g or t.
  misc_feature (1250239)..(1250239): n is a or c or g or t.
  misc_feature (1302432)..(1302434): n is a or c or g or t.
  misc_feature (1302471)..(1302471): n is a or c or g or t.
  misc_feature (1302488)..(1302488): n is a or c or g or t.
  misc_feature (1674836)..(1674836): n is a or c or g or t.
MKIEKLIIKDFRSHALTKVNFSSGINLIIGQNGSGKSSILDALLVGLYWPSKPKDLKKDDFERINGSGTEITVFFEKGNVKYQIHRNIGRGLAFVKYHDGSSWKTLETGQKPVRDWMEKLVPYDVFLNAIYIRQGEIDAILESDESREKVVRQVLGLDRYENSYKNLLDVRKEIDARIKAIEDYLKSTENIDELIGNLEKELTSVLREINEISPKLPELRGELGGLEKELKELEKTAEELAKARVELKSEEGNLRELEAKKSGIQSMIRETEKRVEELKEKVKELESLEEKAKEYERLSRFYRNFTEGINRIEKLLATYSQQAENLRERIDELSKKEARVKELLKEKEGLQKELGALEEDLKAYQRAKELMANLERLKKRLTLSEEEIEKLEAEIQKARERKEEIMKELEEIGSRRGELKSIAGERNKALMELKKAKGRCPVCGRELTEEHRKELLEKYTAELKEISAEMKELEKREKKLRAELVEVEKTLKKERELFALKEVLEQIRETEEKLKEYDLEKLEEANEKAEELKKKLAGLEGEIKSLEDEIKKGELLKKKLALVEKKLRELEEERASLLGELKKLGFGDVKELEERLKELEPAYKRYIELRPARDELKREEDLLKSLKLDLTAILKEIEKTSKRVEELRKRVEELEKSYDKDRHEELKGKTRELSNELAGLEARLKSLEERRDEVKASLEKLREEKETRKEKAKELEKLKKARERVQRLREKVKAYKNLLKEGALAKVGEMASEIFEELTEEKYSGVTVKAEENKVRLGVVYNGKEYGLGFLSGGERIALGLAFRLALSLYLAGEISLLILDEPTPYLDEERRRRLVDIMQRYLRKIPQVIVVSHDEELKDAADRVIRVSLENGVSVVREAEVG

SEQ ID NO: 1112 - protein, 381 aa, Thermococcus kodakaraensis KOD1
  misc_feature (321437)..(321437): n is a or c or g or t.
  misc_feature (527833)..(527833): n is a or c or g or t.
  misc_feature (527901)..(527901): n is a or c or g or t.
  misc_feature (527978)..(527978): n is a or c or g or t.
  misc_feature (960838)..(960839): n is a or c or g or t.
  misc_feature (960860)..(960861): n is a or c or g or t.
  misc_feature (960872)..(960873): n is a or c or g or t.
  misc_feature (960879)..(960879): n is a or c or g or t.
  misc_feature (960890)..(960890): n is a or c or g or t.
  misc_feature (1250239)..(1250239): n is a or c or g or t.
  misc_feature (1302432)..(1302434): n is a or c or g or t.
  misc_feature (1302471)..(1302471): n is a or c or g or t.
  misc_feature (1302488)..(1302488): n is a or c or g or t.
  misc_feature (1674836)..(1674836): n is a or c or g or t.
VNQSFLTSFFGIPTMWKPESKTLALGLILLLFSSLYSAVKVSEGAGSILRKTDKILTQVEEIRGLEFKEKPTIVVISKTTALEMWKPGKPDLERLRREELVYKMTLLLPPDYEYIKEESERSAGWIAATVGDTIYIIEENFMADPDTARRTIAHESVHVLQKQWFNAKYGADTFDGTLAIQALIEGDADLVADIYCERNGIPIHKIRSLSGDPLTDIHIFPYVFGDSFVRYLYEKGNWTLVNRAYERYPETTLQVMVPEYYLENRKPKNVTVEVPENWSILRNDRMGAFYLYVLMRDVAKLDNDTAWNVSTSWMGDRLILANNGTDYVILWKVEFEDEKAAELFAETLEKLADGNTYATFEIIRDDNVVTLKAVRRVRVEA

SEQ ID NO: 1113 - protein, 329 aa, Thermococcus kodakaraensis KOD1
  misc_feature (321437)..(321437): n is a or c or g or t.
  misc_feature (527833)..(527833): n is a or c or g or t.
  misc_feature (527901)..(527901): n is a or c or g or t.
  misc_feature (527978)..(527978): n is a or c or g or t.
  misc_feature (960838)..(960839): n is a or c or g or t.
  misc_feature (960860)..(960861): n is a or c or g or t.
  misc_feature (960872)..(960873): n is a or c or g or t.
  misc_feature (960879)..(960879): n is a or c or g or t.
  misc_feature (960890)..(960890): n is a or c or g or t.
  misc_feature (1250239)..(1250239): n is a or c or g or t.
  misc_feature (1302432)..(1302434): n is a or c or g or t.
  misc_feature (1302471)..(1302471): n is a or c or g or t.
  misc_feature (1302488)..(1302488): n is a or c or g or t.
  misc_feature (1674836)..(1674836): n is a or c or g or t.
VDYTLGEPKILYQGPMLTPTVKIQRIPKGTKIETVIKDGKVVREPRTVYRPVKLLIIVSGENYWGTKFIEFHPEKPLTSVNIKVPLHRDNIGPSIQNLNPKNEFQATSVKVGDMFMEDVKIFRLHSVPGVEEHLIINEDDTLAIDSFSQTVAQWEQPSSDRWERSGRVSTPFGYASEVPTSDGKMKTVYATVRYRIDRYDVCGYLICRTVYELIPQEIVYFSKIDTDNDPGTIPSNLIRYSHLRDAGDEFTAYFQESSDDGGVYFSTSVSACAGEGVQICFSGTVDTYRQSSNNRPAVKVIINSWHGNVLYFAKYSENGNYYEVPLQWG

SEQ ID NO: 1114 - protein, 451 aa, Thermococcus kodakaraensis KOD1
  misc_feature (321437)..(321437): n is a or c or g or t.
  misc_feature (527833)..(527833): n is a or c or g or t.
  misc_feature (527901)..(527901): n is a or c or g or t.
  misc_feature (527978)..(527978): n is a or c or g or t.
  misc_feature (960838)..(960839): n is a or c or g or t.
  misc_feature (960860)..(960861): n is a or c or g or t.
  misc_feature (960872)..(960873): n is a or c or g or t.
  misc_feature (960879)..(960879): n is a or c or g or t.
  misc_feature (960890)..(960890): n is a or c or g or t.
  misc_feature (1250239)..(1250239): n is a or c or g or t.
  misc_feature (1302432)..(1302434): n is a or c or g or t.
  misc_feature (1302471)..(1302471): n is a or c or g or t.
  misc_feature (1302488)..(1302488): n is a or c or g or t.
  misc_feature (1674836)..(1674836): n is a or c or g or t.
VMPMAEKKKKRVLILGAAGRDFHNFNVFFRDNPEYEVVAFTATQIPDIEGRIYPPELAGELYPNGIPIWSEDDMEKIIKEHDIDVVVFAYSDVSHEHVMHLASRAHSAGADFWLLGPKSTMLKSSKPVVAVTAVRTGCGKSQTSRKVAQLLQEMGYKVVAIRHPMPYGDLRKQVVQRFATFEDLDKYECTIEEREEYEPYIERGMVVYAGVDYEKILREAEKEADIILWDGGNNDFPFYEPDLWIVVTDPHRPGHELKYHPGETNFRAADVIIINKIDTANRDDIQKVRESIEKVNPNATVIEAASPIFVDKPELIKGKRVLVVEDGPTLTHGGMKYGAGYVAAKKFGAAEIIDPRPYAVGSIIETYKKYPHLDVILPAMGYGKKQIKELEETINRADADVVIMGTPVDLRRFMNLNKPAVRVKYELEEIGQPKLKEVLEEWAKNCEKLKK

SEQ ID NO: 1115 - protein, 310 aa, Thermococcus kodakaraensis KOD1
  misc_feature (321437)..(321437): n is a or c or g or t.
  misc_feature (527833)..(527833): n is a or c or g or t.
  misc_feature (527901)..(527901): n is a or c or g or t.
  misc_feature (527978)..(527978): n is a or c or g or t.
  misc_feature (960838)..(960839): n is a or c or g or t.
  misc_feature (960860)..(960861): n is a or c or g or t.
  misc_feature (960872)..(960873): n is a or c or g or t.
  misc_feature (960879)..(960879): n is a or c or g or t.
  misc_feature (960890)..(960890): n is a or c or g or t.
  misc_feature (1250239)..(1250239): n is a or c or g or t.
  misc_feature (1302432)..(1302434): n is a or c or g or t.
  misc_feature (1302471)..(1302471): n is a or c or g or t.
  misc_feature (1302488)..(1302488): n is a or c or g or t.
  misc_feature (1674836)..(1674836): n is a or c or g or t.
MDWKGRDVISIRDFSKEDIEFVLKVAERLEEELNEKGSLDYARGKILATLFFEPSTRTRLSFESAMHRLGGSVIGFSSASSTSVKKGESLADTIKTVEQYSDVIVIRHPMEGAARLAAEVAGIPVINAGDGSNQHPTQTLLDLYTIKKAFGKIDGLTIGLLGDLKYGRTVHSLAEALAFYDVELYLISPELLRMPKHIVDELRERGVKVYETTDLEGAIPKLDVLYVTRIQRERFPDEEEYLKVKGSYQVNLEVLKNAKETLKVMHPLPRVDEIHPEVDKTKHALYFRQVFSGVPVRMALLGLTLGVLGV

SEQ ID NO: 1116 - protein, 152 aa, Thermococcus kodakaraensis KOD1
  misc_feature (321437)..(321437): n is a or c or g or t.
  misc_feature (527833)..(527833): n is a or c or g or t.
  misc_feature (527901)..(527901): n is a or c or g or t.
  misc_feature (527978)..(527978): n is a or c or g or t.
  misc_feature (960838)..(960839): n is a or c or g or t.
  misc_feature (960860)..(960861): n is a or c or g or t.
  misc_feature (960872)..(960873): n is a or c or g or t.
  misc_feature (960879)..(960879): n is a or c or g or t.
  misc_feature (960890)..(960890): n is a or c or g or t.
  misc_feature (1250239)..(1250239): n is a or c or g or t.
  misc_feature (1302432)..(1302434): n is a or c or g or t.
  misc_feature (1302471)..(1302471): n is a or c or g or t.
  misc_feature (1302488)..(1302488): n is a or c or g or t.
  misc_feature (1674836)..(1674836): n is a or c or g or t.
MPENLKIEVIPEGTVIDHIPAGKWLKVIEILGLTKPNGGTLLIASNVPSKKLGRKDIVKVEGRYLSEEEVNKIALIAPMATVNIVKDYKIIEKFNVEIPDEITGILKCPNPNCVSNHEYVTPRFHVESREPLKLRCHYCERTINEDEIAQNL

SEQ ID NO: 1117 - protein, 267 aa, Thermococcus kodakaraensis KOD1
  misc_feature (321437)..(321437): n is a or c or g or t.
  misc_feature (527833)..(527833): n is a or c or g or t.
  misc_feature (527901)..(527901): n is a or c or g or t.
  misc_feature (527978)..(527978): n is a or c or g or t.
  misc_feature (960838)..(960839): n is a or c or g or t.
  misc_feature (960860)..(960861): n is a or c or g or t.
  misc_feature (960872)..(960873): n is a or c or g or t.
  misc_feature (960879)..(960879): n is a or c or g or t.
  misc_feature (960890)..(960890): n is a or c or g or t.
  misc_feature (1250239)..(1250239): n is a or c or g or t.
  misc_feature (1302432)..(1302434): n is a or c or g or t.
  misc_feature (1302471)..(1302471): n is a or c or g or t.
  misc_feature (1302488)..(1302488): n is a or c or g or t.
  misc_feature (1674836)..(1674836): n is a or c or g or t.
MEVKDIEKLVREIRREHGLPDSPFRIDEVRYDEKNDKLFIIAHDRTDKSVIIGNSLVIGKLRERLGVGQVTVYSNLDLEIKRRKLELAEKAVKGTKLEFLLPIIEAEKRFPPREWPDVRGELNTLIFLSFNARALVGFAEKLGLPYKAVGLKYAFPKLNYEPIEGEPRELFFPDEEKLVKIAKGKGAELVLADFPFGLTWRGDIALLNPFRFLHIGFFELKYLFGFDWPTIVDKNALIDFVVGLTYEGLMESTDGANLIWRAWRRGR

SEQ ID NO: 1118 - protein, 142 aa, Thermococcus kodakaraensis KOD1
  misc_feature (321437)..(321437): n is a or c or g or t.
  misc_feature (527833)..(527833): n is a or c or g or t.
  misc_feature (527901)..(527901): n is a or c or g or t.
  misc_feature (527978)..(527978): n is a or c or g or t.
  misc_feature (960838)..(960839): n is a or c or g or t.
  misc_feature (960860)..(960861): n is a or c or g or t.
  misc_feature (960872)..(960873): n is a or c or g or t.
  misc_feature (960879)..(960879): n is a or c or g or t.
  misc_feature (960890)..(960890): n is a or c or g or t.
  misc_feature (1250239)..(1250239): n is a or c or g or t.
  misc_feature (1302432)..(1302434): n is a or c or g or t.
  misc_feature (1302471)..(1302471): n is a or c or g or t.
  misc_feature (1302488)..(1302488): n is a or c or g or t.
  misc_feature (1674836)..(1674836): n is a or c or g or t.
MRKVLIVLTVILIGLIGAFLGYRYVGPPGPGEVERIIQSPCVIDPATARLYTAIKAGLTSLSAAIGIVLLWIYGNLYRKVRSEFTLGLMVATSALLVYAVTANPLFHRLVGHTRAIGPGPVLVVPDFFIALALAVLLYLALK

SEQ ID NO: 1119 - protein, 1259 aa, Thermococcus kodakaraensis KOD1
  misc_feature (321437)..(321437): n is a or c or g or t.
  misc_feature (527833)..(527833): n is a or c or g or t.
  misc_feature (527901)..(527901): n is a or c or g or t.
  misc_feature (527978)..(527978): n is a or c or g or t.
  misc_feature (960838)..(960839): n is a or c or g or t.
  misc_feature (960860)..(960861): n is a or c or g or t.
  misc_feature (960872)..(960873): n is a or c or g or t.
  misc_feature (960879)..(960879): n is a or c or g or t.
  misc_feature (960890)..(960890): n is a or c or g or t.
  misc_feature (1250239)..(1250239): n is a or c or g or t.
  misc_feature (1302432)..(1302434): n is a or c or g or t.
  misc_feature (1302471)..(1302471): n is a or c or g or t.
  misc_feature (1302488)..(1302488): n is a or c or g or t.
  misc_feature (1674836)..(1674836): n is a or c or g or t.
VVGMKRRAALVLVVLILLSGVPGTTLAGTQEEKAGTINPLFKNPLKELSTAEDGEREALIALMEALLNETLNGDIIVSDTMRIRNIHWNGTSLIFQIWWYDNNQPIAMQTYKWENPERALGALRKAKTGETTEESLAKAFTVEPLSTSRGLQIIDVDYLTNDNNGEYVVLYNGGSSTFTASGWYLMDSYAYNNERCWVNETPSIPKNHCYDSFGRDHVRKFSVSLGPGEVRRILVASSSSSAILNNAGDTVYLIDNKGNLADIYSYTGAPKVTVRRISYSPSPPKEGDYLHVTINLDNSGPVNGKGHIELYLDGVLIKKSAVTVYAYHTWEYKMYNVWRATPGSHVLTARFVPDYGGSPSSSSTTLKVSESRPYISGVSHTMLVEKHPIRFHVNVVNPSGNRKDVILKLFVDGVEISRLNSYVYKRWSFDLWWKKPGRGFHDVEIKLYNANGTVVYSTWARNIYVRENSPPEVVRVDLPPFLYSNEWSNGTIVVNDAEGDRVNVSVEVVGRFSFRRTGLYPGYPHRFPLAPIYNHTNCRENVTIRFTPVDEYGKVGETVTKVVPVLTDSDKDGWCNALEWEYGMNPYSNDTDGDGVIDSKDVDPLRDVKVTVYILRAKALDDVDSSIAGHNPADMSLELTVNGQTKTLFLTDNQDDYEKKIIPITNPLVNVQSYAIALTTFDVPDDKEVAIIRFHLYDRDDNGKRTEMDVSPSKGTVAVIHYNLKTGTWSGDDYQGDEEKYFGYGHLSGCGDGSCNVGPKEPDKDLKVYVKYESILEKAKINGEIIDIKTIEGVNDVTVKDGTTAFSIVKPKNLKVARVRLENGTVINVTLVNTYGTDVTSPGNEVVATTSSSSPAEILSNGSMSNDVKTLKGDVKVVTSSGEMPLKSDLVVSYSSADDTPDGEIWFVITTNDADGIPFYREIELNKELEANGFTERFDPSDRKADDMNGDYDGDGVPNSVELFIGKDPAKRDILGISLTVSTEWALSEEDKRNLVYSIRKASDFVYDYTDGYAMITSVQIWDDKRQWDDADVRVHKTKWVIPQTRTELLYKGWPKASIGGYWIKRFSNATESQKHEFHIMMSKKIISAASAFSDQNIVISIGDVDWGKTLGHELGHYVFWLYDEYLDVKGRNYYSIKDYKMNALKMWFGEVPPHSVMNVQFRYSELSWPQDYARFNSTLTEMFKNSVEEHVTEQWKVSRSCWEAFAKFIREEWYITIQPDNLLVHKPSIIPDMPFSSMYVPVTGPYTGVGYFMEVTWK

SEQ ID NO: 1120 - protein, 70 aa, Thermococcus kodakaraensis KOD1
  misc_feature (321437)..(321437): n is a or c or g or t.
  misc_feature (527833)..(527833): n is a or c or g or t.
  misc_feature (527901)..(527901): n is a or c or g or t.
  misc_feature (527978)..(527978): n is a or c or g or t.
  misc_feature (960838)..(960839): n is a or c or g or t.
  misc_feature (960860)..(960861): n is a or c or g or t.
  misc_feature (960872)..(960873): n is a or c or g or t.
  misc_feature (960879)..(960879): n is a or c or g or t.
  misc_feature (960890)..(960890): n is a or c or g or t.
  misc_feature (1250239)..(1250239): n is a or c or g or t.
  misc_feature (1302432)..(1302434): n is a or c or g or t.
  misc_feature (1302471)..(1302471): n is a or c or g or t.
  misc_feature (1302488)..(1302488): n is a or c or g or t.
  misc_feature (1674836)..(1674836): n is a or c or g or t.
VFEKIEPERFKQTIKGSLRFTISIFKYDGKLEVFSDWINTENNFHAYWRIYPSNSIQKIYFDRILGYHCG

SEQ ID NO: 1121 - protein, 695 aa, Thermococcus kodakaraensis KOD1
  misc_feature (321437)..(321437): n is a or c or g or t.
  misc_feature (527833)..(527833): n is a or c or g or t.
  misc_feature (527901)..(527901): n is a or c or g or t.
  misc_feature (527978)..(527978): n is a or c or g or t.
  misc_feature (960838)..(960839): n is a or c or g or t.
  misc_feature (960860)..(960861): n is a or c or g or t.
  misc_feature (960872)..(960873): n is a or c or g or t.
  misc_feature (960879)..(960879): n is a or c or g or t.
  misc_feature (960890)..(960890): n is a or c or g or t.
  misc_feature (1250239)..(1250239): n is a or c or g or t.
  misc_feature (1302432)..(1302434): n is a or c or g or t.
  misc_feature (1302471)..(1302471): n is a or c or g or t.
  misc_feature (1302488)..(1302488): n is a or c or g or t.
  misc_feature (1674836)..(1674836): n is a or c or g or t.
VLSRQLFRRPDESLNFHLVSPGGSPELGLYHFASLKTEELIRLKTTKVLVVIMKRALSILLAVFLIASFLTPVKAQCPSEGTTVVLKAPAVSKTPDGRLVGVATDFVITVAPGSGHVYVETWPLSEVDMQASARLAAQIAGKVTGKDMSKYDVFIQVKTDTPIIGGPSAGGTMTVGIIAALMGWEVNPKVMMTGMINPDGTIGPVGGILEKASAAASVGAKLFLIPKGQRIQVIQETQQKTIGGIVQVVQTKSEKVDVVEYAKERWGLEVKEVSDIYEAVYYFTGHALPKPKAPANVFIDTSFLKDDAVKDYQNTTAYYESVREKLKKSNVDYTAYTVLKEALDQAKVILDGAKEALDSGMYYTALSKNFQARIVLRHVDWYISVESPEDVANLLTSVNSYINQTESLVSSKEIRGMTMLQAVAAAEERVEDAKASLQEGWKYYYSADYWNAIDRAAYAYERAQTARFWAGLGERFATGDVIDREELKDTARNYIDESNLIVTYIESMYGNVIGTDLMDTIQKAEQYYGDGKYSAAIFTAMEARVRGEVFLDTLGIDNETILREKLQEMKEAAKTAIGVAQMNGLHPLLSIAYYEFAESYEKGNTTDDLVNAMIFYQYARESAGVFLIKVNESTPNVPSNETAIPALPTNTNTNGETTSTPSATSTSTTSSGIQSVCGPAFILALALLPLLRRRG

SEQ ID NO: 1122 - protein, 118 aa, Thermococcus kodakaraensis KOD1
  misc_feature (321437)..(321437): n is a or c or g or t.
  misc_feature (527833)..(527833): n is a or c or g or t.
  misc_feature (527901)..(527901): n is a or c or g or t.
  misc_feature (527978)..(527978): n is a or c or g or t.
  misc_feature (960838)..(960839): n is a or c or g or t.
  misc_feature (960860)..(960861): n is a or c or g or t.
  misc_feature (960872)..(960873): n is a or c or g or t.
  misc_feature (960879)..(960879): n is a or c or g or t.
  misc_feature (960890)..(960890): n is a or c or g or t.
  misc_feature (1250239)..(1250239): n is a or c or g or t.
  misc_feature (1302432)..(1302434): n is a or c or g or t.
  misc_feature (1302471)..(1302471): n is a or c or g or t.
  misc_feature (1302488)..(1302488): n is a or c or g or t.
  misc_feature (1674836)..(1674836): n is a or c or g or t.
MMDQATPRPRPGVAYPLGVYKFCPDSFINFGLQKYSEVVPMEEPVVIGHDKFKIGEDETAKRELRVVKVHDDVIQIQEEVHGIIALVGASSSVNIKKDELKQLIKIAKEKFGWSDLCE

SEQ ID NO: 1123 - protein, 652 aa, Thermococcus kodakaraensis KOD1
  misc_feature (321437)..(321437): n is a or c or g or t.
  misc_feature (527833)..(527833): n is a or c or g or t.
  misc_feature (527901)..(527901): n is a or c or g or t.
  misc_feature (527978)..(527978): n is a or c or g or t.
  misc_feature (960838)..(960839): n is a or c or g or t.
  misc_feature (960860)..(960861): n is a or c or g or t.
  misc_feature (960872)..(960873): n is a or c or g or t.
  misc_feature (960879)..(960879): n is a or c or g or t.
  misc_feature (960890)..(960890): n is a or c or g or t.
  misc_feature (1250239)..(1250239): n is a or c or g or t.
  misc_feature (1302432)..(1302434): n is a or c or g or t.
  misc_feature (1302471)..(1302471): n is a or c or g or t.
  misc_feature (1302488)..(1302488): n is a or c or g or t.
  misc_feature (1674836)..(1674836): n is a or c or g or t.
MKFTVLHLKLDERKVESEEFEKEGVYGIIDYGLELHERLGTHSIEPYDPKNVVVMGMGPFSGSILPGAHRLMFFFRSPLYGTLFPSAMGGAAYAFKNVGVDFVTFEGKAEKPVVVILYNDGSNINVELHEIELEKLIEIWKDYKGEEGVYALTQYLIDTFGERFDFEYRIAVVGPAALNSNYGAIFSQTLRKGKRVEGSEDWAARGGSGSVLLRAHNVVGIIFGGKPRKREFPGEDISSFRTAKEIVEGVHKKPYNDVIAEKTVKYKYNPKLKTGGTFGGNYPAEGDFVPILNWQMPYIPKEERIKIHEAIMKYYWEPFNKEAIETKNWTNCGEPCPVVCKKYANGHHIEYEPREANGPLSGVITLRASDISVPAVDAMGFDAIEFGGTAAWVLELVHRGILKPEEVGLSDVPDFTKEALLERPVEASEKNAKLVAELAHRVAFAENEIAKILGLGKRKASVILDEKFKDRLKYGESFKDYAVFTPLGEDGEMTPTMYWAIGNYIPLPIQGRYWTFYQFGVFLEPEELAQKIIASALWEFWYDNVGWCRFHRGWMKPVLKALFMEAYGENVDMEEHAKKQIKRLIEFAREAGYTPVFWDSMRVIDLVARGSEEFGNEKWAEKFKIDKVGTAREYLEKVLDTYSEMLGVEWRL

SEQ ID NO: 1124 - protein, 446 aa, Thermococcus kodakaraensis KOD1
  misc_feature (321437)..(321437): n is a or c or g or t.
  misc_feature (527833)..(527833): n is a or c or g or t.
  misc_feature (527901)..(527901): n is a or c or g or t.
  misc_feature (527978)..(527978): n is a or c or g or t.
  misc_feature (960838)..(960839): n is a or c or g or t.
  misc_feature (960860)..(960861): n is a or c or g or t.
  misc_feature (960872)..(960873): n is a or c or g or t.
  misc_feature (960879)..(960879): n is a or c or g or t.
  misc_feature (960890)..(960890): n is a or c or g or t.
  misc_feature (1250239)..(1250239): n is a or c or g or t.
  misc_feature (1302432)..(1302434): n is a or c or g or t.
  misc_feature (1302471)..(1302471): n is a or c or g or t.
  misc_feature (1302488)..(1302488): n is a or c or g or t.
  misc_feature (1674836)..(1674836): n is a or c or g or t.
MSKGVVHPYNGQTLIFFLTLGISGGRMRAVVIGSGIGGLLTAGFLARKGYDVTVLEKAPYIGGRFTNLNYKGFGLSTGAFHMLPHGEDGPLAHLLKLLGANVTIVNSNPKGMIFYEGKTFHYREGWKYLGWKEKARAMKLMADIKRNKLPTGEEAEMSGRGWIKEKIGDNEFTDLFIKSFLGWADSVLDVPAGELAREIKAALKWGGPGLVRGGCKALTDELARIVVENGGKILTGKKAVEVDAEAKKVVTADNEEFPYDVLISNIGIKETVELLGRENFDREYLRHVESLKPSEGIKYNVALKGESRIGNTVVFTLDTERINGYNEPTALSPELAPEGYTLIMLHHALQSRNVKEEQKKGIDDIYRIFPNLDEEGEILLIQTYLDGNPVNRVASGQAVEDFPIQDIYIVGDAYKLPGGIEVEGIALGVMKTLERLGLGSFSEWYL

SEQ ID NO: 1125 - protein, 315 aa, Thermococcus kodakaraensis KOD1
  misc_feature (321437)..(321437): n is a or c or g or t.
  misc_feature (527833)..(527833): n is a or c or g or t.
  misc_feature (527901)..(527901): n is a or c or g or t.
  misc_feature (527978)..(527978): n is a or c or g or t.
  misc_feature (960838)..(960839): n is a or c or g or t.
  misc_feature (960860)..(960861): n is a or c or g or t.
  misc_feature (960872)..(960873): n is a or c or g or t.
  misc_feature (960879)..(960879): n is a or c or g or t.
  misc_feature (960890)..(960890): n is a or c or g or t.
  misc_feature (1250239)..(1250239): n is a or c or g or t.
  misc_feature (1302432)..(1302434): n is a or c or g or t.
  misc_feature (1302471)..(1302471): n is a or c or g or t.
  misc_feature (1302488)..(1302488): n is a or c or g or t.
  misc_feature (1674836)..(1674836): n is a or c or g or t.
MKRVVIALGGNAILQRGQKGTYEEQMENVRRTAKQIADIILDGDYEVVITHGNGPQVGALLLHMDAGQQVYGIPAQPMDVAGAMTQGQIGYMIGQALINELRKRGVEKPVATIVTQTIVDKNDPAFQNPSKPVGPFYDEETAKKLAKEKGWTVIEDAGRGWRRVVPSPDPKGHVEAPVIVDLVEKGFIVIASGGGGVPVIEENGELKGVEAVIDKDLAGEKLAEEVKADIFMILTDVNGAAINYGKPDEKWLGKVTVDELKRYYKEGHFKKGSMGPKVLAAIRFVEWGGERAVIASLDRAVEALEGKTGTQVVRE

SEQ ID NO: 1126 - protein, 301 aa, Thermococcus kodakaraensis KOD1
  misc_feature (321437)..(321437): n is a or c or g or t.
  misc_feature (527833)..(527833): n is a or c or g or t.
  misc_feature (527901)..(527901): n is a or c or g or t.
  misc_feature (527978)..(527978): n is a or c or g or t.
  misc_feature (960838)..(960839): n is a or c or g or t.
  misc_feature (960860)..(960861): n is a or c or g or t.
  misc_feature (960872)..(960873): n is a or c or g or t.
  misc_feature (960879)..(960879): n is a or c or g or t.
  misc_feature (960890)..(960890): n is a or c or g or t.
  misc_feature (1250239)..(1250239): n is a or c or g or t.
  misc_feature (1302432)..(1302434): n is a or c or g or t.
  misc_feature (1302471)..(1302471): n is a or c or g or t.
  misc_feature (1302488)..(1302488): n is a or c or g or t.
  misc_feature (1674836)..(1674836): n is a or c or g or t.
MTTVKVDPEEIKRIKREIEALEKERNEIRAKLDELEKELQVWIQKRDEKNKEVQQLRQKGREYKAKRDEINQKIQELKKNREEINAKLDLLYQEILEYKTKRNEYNQLRRLKMSPERIQERIEKLEWELQTNPNITPEREKQIVDQIQVLATELEIIQQAERFHKKLVETRKKVDQLKKARKAISLEIQKLANQSQQFHEQMIQAFNKADEVKKEADEYHQKVVELREKVREARKQLREIERKIREYDEKHKELIAYRLVAKMRAKKDANFEKAVEALEKFKRGEKLTLDELLLLQRYNLV

SEQ ID NO: 1127 - protein, 568 aa, Thermococcus kodakaraensis KOD1
  misc_feature (321437)..(321437): n is a or c or g or t.
  misc_feature (527833)..(527833): n is a or c or g or t.
  misc_feature (527901)..(527901): n is a or c or g or t.
  misc_feature (527978)..(527978): n is a or c or g or t.
  misc_feature (960838)..(960839): n is a or c or g or t.
  misc_feature (960860)..(960861): n is a or c or g or t.
  misc_feature (960872)..(960873): n is a or c or g or t.
  misc_feature (960879)..(960879): n is a or c or g or t.
  misc_feature (960890)..(960890): n is a or c or g or t.
  misc_feature (1250239)..(1250239): n is a or c or g or t.
  misc_feature (1302432)..(1302434): n is a or c or g or t.
  misc_feature (1302471)..(1302471): n is a or c or g or t.
  misc_feature (1302488)..(1302488): n is a or c or g or t.
  misc_feature (1674836)..(1674836): n is a or c or g or t.
MEVIKHEGPGRLGVVRLGDYSFRTPALVGIDFTLSPFNSFFHPKEPGEYDFNLAPSIPLGFYTPDEVIQKAIGRLWSVNYDGFNAFYLPALRRTEYLEEFFKIIDRHNFDAVYLGNSKILIKEYRYFVRILRELRERFPNVMIIADLEPFFYPLAVYLGIDAFDTRSLKLYDFEGKGFTQFSPFLWSNEPNSLDFAREVILLVRKALEEGKLRYLVENFFPTQYNAGILRIADLEHPDYLEKYTPIQKETVYFISDASIRRPEVKRWHERVLERFTPPKNVELLLLFPCSAKKPYSFSRSHTLYRRAVKEALGSGTSKVHELILTSPFGVVPREWEWLAKYDIVVTGHWSEEEIKPAAELLAKTLEKYPEDIPIVAHLDEAYVEIAKLASELSGREIIFTDVKNGTTSHESLRSLTETLREFQIEGTKEDRTYRYFENIRKVFDFYFGVGAGEAILPENGQVKGSKMLRIFVEGQQTGTFTDGVISVTPYGMQRIYDALKSYWVKIDFELRGDVFAVGVEEADPRIRPDDIVGIVRDEKVVGVGKAVLSGEEMVRAKKGVAVKVRKRV

SEQ ID NO: 1128 - protein, 102 aa, Thermococcus kodakaraensis KOD1
  misc_feature (321437)..(321437): n is a or c or g or t.
  misc_feature (527833)..(527833): n is a or c or g or t.
  misc_feature (527901)..(527901): n is a or c or g or t.
  misc_feature (527978)..(527978): n is a or c or g or t.
  misc_feature (960838)..(960839): n is a or c or g or t.
  misc_feature (960860)..(960861): n is a or c or g or t.
  misc_feature (960872)..(960873): n is a or c or g or t.
  misc_feature (960879)..(960879): n is a or c or g or t.
  misc_feature (960890)..(960890): n is a or c or g or t.
  misc_feature (1250239)..(1250239): n is a or c or g or t.
  misc_feature (1302432)..(1302434): n is a or c or g or t.
  misc_feature (1302471)..(1302471): n is a or c or g or t.
  misc_feature (1302488)..(1302488): n is a or c or g or t.
  misc_feature (1674836)..(1674836): n is a or c or g or t.
VFSNMPKHFKRGVKREHHFLKGLEKPLEEIARIPGVKKVIPGRIYASDSRGFEIKVTRETQTGLKLVAKSDGSVQEVFLVVDKADRKGVWREIESLAEEWGK

SEQ ID NO: 1129 - protein, 484 aa, Thermococcus kodakaraensis KOD1
  misc_feature (321437)..(321437): n is a or c or g or t.
  misc_feature (527833)..(527833): n is a or c or g or t.
  misc_feature (527901)..(527901): n is a or c or g or t.
  misc_feature (527978)..(527978): n is a or c or g or t.
  misc_feature (960838)..(960839): n is a or c or g or t.
  misc_feature (960860)..(960861): n is a or c or g or t.
  misc_feature (960872)..(960873): n is a or c or g or t.
  misc_feature (960879)..(960879): n is a or c or g or t.
  misc_feature (960890)..(960890): n is a or c or g or t.
  misc_feature (1250239)..(1250239): n is a or c or g or t.
  misc_feature (1302432)..(1302434): n is a or c or g or t.
  misc_feature (1302471)..(1302471): n is a or c or g or t.
  misc_feature (1302488)..(1302488): n is a or c or g or t.
  misc_feature (1674836)..(1674836): n is a or c or g or t.
MLFKNYRFPGRYGPEWGSGGIFGLRYHNGVLYFTVAFEAEAHFIDVKSGEEKTYDFTLVGDAPTSGGDTYNAVETVDEFIYFGGWVHAPAVYREDRRILFNNKYSHVHVYDTAEGSVKLLWKESIHHETDWAGEISDIIYDPYGDRLLLAREDGHANLGVYSLDRKRGKAEPLITEPSPKGTRVHDVAFFGVGNNFTGGVREFRALDLISGKWEAFKPGGSVDGKPYERPELGAMASAYNRAFAFVRGGIFAGNPYMGEVFTFYRLLDFPTFYAPFRVNAINVGGGILTAFNSHHDASYRKDSSDAGIGWDFTNTLVGPSVLVYIAPPMVKIVGAFGARVTSIEKMDGKLLVATNTTPNTGATEATPFDTGNRDIVVLDEKILQERPPAVSFSVPLDLLRKAGKRTFGGIPLDGYKSARAIFYVKNDIKLKVYEYDLSLPAGTAEEEIVDLKAGRNVIDLRTFSGIVGFELEKEVKGKVRIELL

SEQ ID NO: 1130 - protein, 116 aa, Thermococcus kodakaraensis KOD1
  misc_feature (321437)..(321437): n is a or c or g or t.
  misc_feature (527833)..(527833): n is a or c or g or t.
  misc_feature (527901)..(527901): n is a or c or g or t.
  misc_feature (527978)..(527978): n is a or c or g or t.
  misc_feature (960838)..(960839): n is a or c or g or t.
  misc_feature (960860)..(960861): n is a or c or g or t.
  misc_feature (960872)..(960873): n is a or c or g or t.
  misc_feature (960879)..(960879): n is a or c or g or t.
  misc_feature (960890)..(960890): n is a or c or g or t.
  misc_feature (1250239)..(1250239): n is a or c or g or t.
  misc_feature (1302432)..(1302434): n is a or c or g or t.
  misc_feature (1302471)..(1302471): n is a or c or g or t.
  misc_feature (1302488)..(1302488): n is a or c or g or t.
  misc_feature (1674836)..(1674836): n is a or c or g or t.
MPARDMRMEMFVRAIMRRDLTKAKGHMEKLIKIAGSDEWGRGYARAVEGIMNAVKDNDTDSLIVQLLTTNDRERATELLSVYSEMAAQEFRDEYEKGYYTAWAEFLKAYLNQKTLA

SEQ ID NO: 1131 - protein, 565 aa, Thermococcus kodakaraensis KOD1
  misc_feature (321437)..(321437): n is a or c or g or t.
  misc_feature (527833)..(527833): n is a or c or g or t.
  misc_feature (527901)..(527901): n is a or c or g or t.
  misc_feature (527978)..(527978): n is a or c or g or t.
  misc_feature (960838)..(960839): n is a or c or g or t.
  misc_feature (960860)..(960861): n is a or c or g or t.
  misc_feature (960872)..(960873): n is a or c or g or t.
  misc_feature (960879)..(960879): n is a or c or g or t.
  misc_feature (960890)..(960890): n is a or c or g or t.
  misc_feature (1250239)..(1250239): n is a or c or g or t.
  misc_feature (1302432)..(1302434): n is a or c or g or t.
  misc_feature (1302471)..(1302471): n is a or c or g or t.
  misc_feature (1302488)..(1302488): n is a or c or g or t.
  misc_feature (1674836)..(1674836): n is a or c or g or t.
VVRMSDMRYSELADLYRRLEKTTLKTLKTKFVADFLKKTPDELLEIVPYLILGKVFPDWDERELGVGEKLLIKAVSMATGVPEKEIEDSVRDTGDLGESVALAIKKKKQKSFFSQPLTIKRVYDTFVKIAEAQGEGSQDRKMKYLANLFMDAEPEEGKYLARTVLGTMRTGVAEGILRDAIAEAFRVKPELVERAYMLTSDFGYVAKIAKLEGNEGLSKVRIQIGKPIRPMLAQNAASVKDALIEMGGEAAFEIKYDGARVQVHKDGDKVIVYSRRLENVTRSIPEVIEAIKAALKPEKAIVEGELVAVGENGRPRPFQYVLRRFRRKYNIDEMIEKIPLELNLFDVMFVDGESLIETKFIDRRNKLEEIVKESEKIKLAEQLITKKVEEAEAFYRRALELGHEGLMAKRLDSIYEPGNRGKKWLKIKPTMENLDLVIIGAEWGEGRRAHLLGSFLVAAYDPHSGEFLPVGKVGSGFTDEDLVEFTKMLKPYIVRQEGKFVEIEPKFVIEVTYQEIQKSPKYKSGFALRFPRYVALREDKSPEEADTIERVAELYELQERFKAKK

SEQ ID NO: 1132 - protein, 189 aa, Thermococcus kodakaraensis KOD1
  misc_feature (321437)..(321437): n is a or c or g or t.
  misc_feature (527833)..(527833): n is a or c or g or t.
  misc_feature (527901)..(527901): n is a or c or g or t.
  misc_feature (527978)..(527978): n is a or c or g or t.
  misc_feature (960838)..(960839): n is a or c or g or t.
  misc_feature (960860)..(960861): n is a or c or g or t.
  misc_feature (960872)..(960873): n is a or c or g or t.
  misc_feature (960879)..(960879): n is a or c or g or t.
  misc_feature (960890)..(960890): n is a or c or g or t.
  misc_feature (1250239)..(1250239): n is a or c or g or t.
  misc_feature (1302432)..(1302434): n is a or c or g or t.
  misc_feature (1302471)..(1302471): n is a or c or g or t.
  misc_feature (1302488)..(1302488): n is a or c or g or t.
  misc_feature (1674836)..(1674836): n is a or c or g or t.
MGITMSDSKDELIRMFFDEEAILFGRFILTSGKESNYYINVKKLSTKPRALKLIAKLMAGEAQKRGITFDRVAGPELGAVPIATALALETEKPLVIVRKKPKGHGTGSQLEGEVKAGDKVLLVEDVTTTGGSVLRAAEVLEREGAEIAAIMVVVDREEGAEETIGAKYTFLPLVRVSELFARRKEPQKE

SEQ ID NO: 1133 - protein, 222 aa, Thermococcus kodakaraensis KOD1
  misc_feature (321437)..(321437): n is a or c or g or t.
  misc_feature (527833)..(527833): n is a or c or g or t.
  misc_feature (527901)..(527901): n is a or c or g or t.
  misc_feature (527978)..(527978): n is a or c or g or t.
  misc_feature (960838)..(960839): n is a or c or g or t.
  misc_feature (960860)..(960861): n is a or c or g or t.
  misc_feature (960872)..(960873): n is a or c or g or t.
  misc_feature (960879)..(960879): n is a or c or g or t.
  misc_feature (960890)..(960890): n is a or c or g or t.
  misc_feature (1250239)..(1250239): n is a or c or g or t.
  misc_feature (1302432)..(1302434): n is a or c or g or t.
  misc_feature (1302471)..(1302471): n is a or c or g or t.
  misc_feature (1302488)..(1302488): n is a or c or g or t.
  misc_feature (1674836)..(1674836): n is a or c or g or t.
VEREWKARRLSDLRWRTIMEREEGHLPGLRLRSEGGGRMRTAKAQLVKYSRKAHERGLTAAFGGNLSIRVGDLVFIKATGSVMDEMTPEQVAVVALDGRQISGVKPSSEYRLHLAVYRERPDVKAIAHLHPPYSIVASALLTGELPILTPEAEIYLGKIPIAPFRPAGTEELAEVVAEKIREADAVLMERHGIVTVGRSLREAFYKAELVEESAKLWYLSRK

SEQ ID NO: 1134 - protein, 444 aa, Thermococcus kodakaraensis KOD1
  misc_feature (321437)..(321437): n is a or c or g or t.
  misc_feature (527833)..(527833): n is a or c or g or t.
  misc_feature (527901)..(527901): n is a or c or g or t.
  misc_feature (527978)..(527978): n is a or c or g or t.
  misc_feature (960838)..(960839): n is a or c or g or t.
  misc_feature (960860)..(960861): n is a or c or g or t.
  misc_feature (960872)..(960873): n is a or c or g or t.
  misc_feature (960879)..(960879): n is a or c or g or t.
  misc_feature (960890)..(960890): n is a or c or g or t.
  misc_feature (1250239)..(1250239): n is a or c or g or t.
  misc_feature (1302432)..(1302434): n is a or c or g or t.
  misc_feature (1302471)..(1302471): n is a or c or g or t.
  misc_feature (1302488)..(1302488): n is a or c or g or t.
  misc_feature (1674836)..(1674836): n is a or c or g or t.
VVVRMSLDFFFYPKSVAVFGSFKKGAIAYEILRNIVEGGFKGKIIPVNPKGGTVEVSGKTFEIREKLDEQVDTAIIAVPAKIVPALIDEIGPLIKGAVVISAGFSEVGNEELERELVKKARKHGVRLIGPNCAGIFGVHGKFFGSFEVRVKPGGLALISQSGAFGGAALAMGNDERIGFSAFVSYGNAADLNESDFLEYFADDENTKAIALYIEGVKDGRRFLNALRYASSKKPIIVLKAGKSASGAKAAASHTGSLAGSYEIYRAAFKQAGAIEVEEMEELFDAAKAFEMYQRAGKRVAVITNSGGPGVLATDKLERLGLEIAKLEEKTVEELRSFLPPQCSLKNPIDLIADADYERYRKTIEVVCKDENVDALLVICVPPIFIPSEEIARAVIEAECDKPVIVNFMAGELVKEGVELLDEHGIKNFPTPERAARALKWLSMR

SEQ ID NO: 1135 - protein, 325 aa, Thermococcus kodakaraensis KOD1
  misc_feature (321437)..(321437): n is a or c or g or t.
  misc_feature (527833)..(527833): n is a or c or g or t.
  misc_feature (527901)..(527901): n is a or c or g or t.
  misc_feature (527978)..(527978): n is a or c or g or t.
  misc_feature (960838)..(960839): n is a or c or g or t.
  misc_feature (960860)..(960861): n is a or c or g or t.
  misc_feature (960872)..(960873): n is a or c or g or t.
  misc_feature (960879)..(960879): n is a or c or g or t.
  misc_feature (960890)..(960890): n is a or c or g or t.
  misc_feature (1250239)..(1250239): n is a or c or g or t.
  misc_feature (1302432)..(1302434): n is a or c or g or t.
  misc_feature (1302471)..(1302471): n is a or c or g or t.
  misc_feature (1302488)..(1302488): n is a or c or g or t.
  misc_feature (1674836)..(1674836): n is a or c or g or t.
MIALGIEGTAHTLGIGIVTEKSVLANVFDTLTTEKGGIHPKEAAEHHARLLKPLLRKALETAGVTMEDVDLIAFSQGPGLGPALRVVATAARALAIKYNKPIVGVNHCIAHVEITKMFGVKDPVGLYVSGGNTQVLALEGGRYRVFGETLDIGIGNAIDTFARELGIGFPGGPKIEKLALKGEKYIELPYAVKGMDLSFSGVLTEAVRKYRTGKYRIEDLAYSFQETAFAALVEVTERAVAHTGKEEVVLVGGVAANNRLREMLKIMAEDRGIKFFVPPYDLCRDNGAMIAYTGLRMYRGGVRFKIEDTVVKQKFRTDEVEVVWD

SEQ ID NO: 1136 - protein, 236 aa, Thermococcus kodakaraensis KOD1
  misc_feature (321437)..(321437): n is a or c or g or t.
  misc_feature (527833)..(527833): n is a or c or g or t.
  misc_feature (527901)..(527901): n is a or c or g or t.
  misc_feature (527978)..(527978): n is a or c or g or t.
  misc_feature (960838)..(960839): n is a or c or g or t.
  misc_feature (960860)..(960861): n is a or c or g or t.
  misc_feature (960872)..(960873): n is a or c or g or t.
  misc_feature (960879)..(960879): n is a or c or g or t.
  misc_feature (960890)..(960890): n is a or c or g or t.
  misc_feature (1250239)..(1250239): n is a or c or g or t.
  misc_feature (1302432)..(1302434): n is a or c or g or t.
  misc_feature (1302471)..(1302471): n is a or c or g or t.
  misc_feature (1302488)..(1302488): n is a or c or g or t.
  misc_feature (1674836)..(1674836): n is a or c or g or t.
VVVNMLTERELERYDRQIMIFGEEGQEKLKGAKVAVVGVGGLGSPVAYYLAAAGIGTVLLIDEQTPELSNLNRQILHWEEDVGRRSKPESAKWKLERFNSDIKIEAYTGRLTAENIDEVLKDVDIVVDCLDNFQTRYLLDEYVHRKRIPLVHGAVEGMHGQVTTIVPGITKSLREIFPKVREKEEKFPIIGATAGVVGSIQAMEVIKLLTGIGEPLLNKLLLIDLAMNIFEVVELK

SEQ ID NO: 1137 - protein, 141 aa, Thermococcus kodakaraensis KOD1
  misc_feature (321437)..(321437): n is a or c or g or t.
  misc_feature (527833)..(527833): n is a or c or g or t.
  misc_feature (527901)..(527901): n is a or c or g or t.
  misc_feature (527978)..(527978): n is a or c or g or t.
  misc_feature (960838)..(960839): n is a or c or g or t.
  misc_feature (960860)..(960861): n is a or c or g or t.
  misc_feature (960872)..(960873): n is a or c or g or t.
  misc_feature (960879)..(960879): n is a or c or g or t.
  misc_feature (960890)..(960890): n is a or c or g or t.
  misc_feature (1250239)..(1250239): n is a or c or g or t.
  misc_feature (1302432)..(1302434): n is a or c or g or t.
  misc_feature (1302471)..(1302471): n is a or c or g or t.
  misc_feature (1302488)..(1302488): n is a or c or g or t.
  misc_feature (1674836)..(1674836): n is a or c or g or t.
MKVRLTKDKFSVDEAISLLRVPESGAYVVFLGQVRNENLGRKVEKLIYEAYPEMAEAEMERIREEALKKFPILDMVIWHRYGELDVGEDTILIVASAKHRKEAFRACEWAIDEVKRRVPVWKKEVTPEGAFWLEGDKAVRE

SEQ ID NO: 1138 - protein, 224 aa, Thermococcus kodakaraensis KOD1 [sequence omitted]

SEQ ID NO: 1139 - protein, 160 aa, Thermococcus kodakaraensis KOD1
  misc_feature (321437)..(321437): n is a or c or g or t.
  misc_feature (527833)..(527833): n is a or c or g or t.
  misc_feature (527901)..(527901): n is a or c or g or t.
  misc_feature (527978)..(527978): n is a or c or g or t.
  misc_feature (960838)..(960839): n is a or c or g or t.
  misc_feature (960860)..(960861): n is a or c or g or t.
  misc_feature (960872)..(960873): n is a or c or g or t.
  misc_feature (960879)..(960879): n is a or c or g or t.
  misc_feature (960890)..(960890): n is a or c or g or t.
  misc_feature (1250239)..(1250239): n is a or c or g or t.
  misc_feature (1302432)..(1302434): n is a or c or g or t.
  misc_feature (1302471)..(1302471): n is a or c or g or t.
  misc_feature (1302488)..(1302488): n is a or c or g or t.
  misc_feature (1674836)..(1674836): n is a or c or g or t.
MILLVTCPQGREGDAILELEWALEKVKVHGTDWRGVLLAETPLSKEEALRRLKDFETQAIQRVVPLEVLVRASFDEIADAVLNLAERIQGSFAVRAKVRGNKKLSQRELERKLGSLIVERYNLPVNLSDPDYTVIVEVLGKKAGVGVLRRGELLRFEVEE

SEQ ID NO: 1140 - protein, 162 aa, Thermococcus kodakaraensis KOD1
  misc_feature (321437)..(321437): n is a or c or g or t.
  misc_feature (527833)..(527833): n is a or c or g or t.
  misc_feature (527901)..(527901): n is a or c or g or t.
  misc_feature (527978)..(527978): n is a or c or g or t.
  misc_feature (960838)..(960839): n is a or c or g or t.
  misc_feature (960860)..(960861): n is a or c or g or t.
  misc_feature (960872)..(960873): n is a or c or g or t.
  misc_feature (960879)..(960879): n is a or c or g or t.
  misc_feature (960890)..(960890): n is a or c or g or t.
  misc_feature (1250239)..(1250239): n is a or c or g or t.
  misc_feature (1302432)..(1302434): n is a or c or g or t.
  misc_feature (1302471)..(1302471): n is a or c or g or t.
  misc_feature (1302488)..(1302488): n is a or c or g or t.
  misc_feature (1674836)..(1674836): n is a or c or g or t.
VVKMMDVDEVIEMLSKLSYEEALAYWISGEREEAKLYKELAERARALGLGESIVKVFEKLSKDSQRHAEELTKIFKESFSREPKTDIPPVEVLSVLNKFERADQIKEVLEAAMESELTAHKVYKLLAEKVEDERLKELYLKLAEVERTHYEALKAEYEKLGD

SEQ ID NO: 1141 - protein, 294 aa, Thermococcus kodakaraensis KOD1
  misc_feature (321437)..(321437): n is a or c or g or t.
  misc_feature (527833)..(527833): n is a or c or g or t.
  misc_feature (527901)..(527901): n is a or c or g or t.
  misc_feature (527978)..(527978): n is a or c or g or t.
  misc_feature (960838)..(960839): n is a or c or g or t.
  misc_feature (960860)..(960861): n is a or c or g or t.
  misc_feature (960872)..(960873): n is a or c or g or t.
  misc_feature (960879)..(960879): n is a or c or g or t.
  misc_feature (960890)..(960890): n is a or c or g or t.
  misc_feature (1250239)..(1250239): n is a or c or g or t.
  misc_feature (1302432)..(1302434): n is a or c or g or t.
  misc_feature (1302471)..(1302471): n is a or c or g or t.
  misc_feature (1302488)..(1302488): n is a or c or g or t.
  misc_feature (1674836)..(1674836): n is a or c or g or t.
MSMVLPKEIMMPNDNPYALHRAKVLRVYPLTEKEKLFLFRFEDAELAEKWTFRPGQFVQLTIPGVGEVPISICSSAMRRGFFELCIRKAGRVTTVVHRLKPGDTVLVRGPYGNGFPVDEWEGMDLLLIAAGLGTAPLRSVFLYAMDNRWKYGNITFINTARYGKDLLFYKELEAMKDLAEAENVKIIQSVTRDPDWPGLHGRPQNFIPEANTNPKKTAVAICGPPRMYKAVFEALINYGYRPENIYVTLERKMKCGIGKCGHCNVGTSTSWKYVCKDGPVFGYFDIISTPGLLD

SEQ ID NO: 1142 - protein, 428 aa, Thermococcus kodakaraensis KOD1
  misc_feature (321437)..(321437): n is a or c or g or t.
  misc_feature (527833)..(527833): n is a or c or g or t.
  misc_feature (527901)..(527901): n is a or c or g or t.
  misc_feature (527978)..(527978): n is a or c or g or t.
  misc_feature (960838)..(960839): n is a or c or g or t.
  misc_feature (960860)..(960861): n is a or c or g or t.
  misc_feature (960872)..(960873): n is a or c or g or t.
  misc_feature (960879)..(960879): n is a or c or g or t.
  misc_feature (960890)..(960890): n is a or c or g or t.
  misc_feature (1250239)..(1250239): n is a or c or g or t.
  misc_feature (1302432)..(1302434): n is a or c or g or t.
  misc_feature (1302471)..(1302471): n is a or c or g or t.
  misc_feature (1302488)..(1302488): n is a or c or g or t.
  misc_feature (1674836)..(1674836): n is a or c or g or t.
MKNVYLPITVDHIARVEGKGGVEIVVGDDGVKEVKLNIIEGPRFFEAITLGKKLDEALAIYPRICSFCSAAHKLTAVEAAEKAIGFTPREEIQALREVLYIGDMIESHALHLYLLVLPDYLGYSGPLHMIDEYKKEMSIALDLKNLGSWMMDELGSRAIHQENAVLGGFGKLPDKSVLENMKRRLKEALPKAEYTFELFTKLEQYEEVEGPITHIAVKPRNGVYGIYGDYLKASDGNEFPSEEYREHIKEFVVEHSFAKHSHYHGKPFMVGAISRLVNNADTLYGRAKELYESYKDLLRSTNPFANNLAQALELVYFTERAIDLIDEALAKWPIRPRDEVALKDGFGVSTTEAPRGVLVYALKVENGRVSYADIITPTAFNLAMMEQHVRMMAEKHYNDDPEKLKLLAEMVVRAYDPCISCSVHVARL

SEQ ID NO: 1143 - protein, 61 aa, Thermococcus kodakaraensis KOD1
  misc_feature (321437)..(321437): n is a or c or g or t.
  misc_feature (527833)..(527833): n is a or c or g or t.
  misc_feature (527901)..(527901): n is a or c or g or t.
  misc_feature (527978)..(527978): n is a or c or g or t.
  misc_feature (960838)..(960839): n is a or c or g or t.
  misc_feature (960860)..(960861): n is a or c or g or t.
  misc_feature (960872)..(960873): n is a or c or g or t.
  misc_feature (960879)..(960879): n is a or c or g or t.
  misc_feature (960890)..(960890): n is a or c or g or t.
  misc_feature (1250239)..(1250239): n is a or c or g or t.
  misc_feature (1302432)..(1302434): n is a or c or g or t.
  misc_feature (1302471)..(1302471): n is a or c or g or t.
  misc_feature (1302488)..(1302488): n is a or c or g or t.
  misc_feature (1674836)..(1674836): n is a or c or g or t.
VIHVKVPKKYAEEFRKEVEARAWYLAHKKELFENLKKLKGIMKTDKSWKEIKRELYEGLID

SEQ ID NO: 1144 - protein, 148 aa, Thermococcus kodakaraensis KOD1
  misc_feature (321437)..(321437): n is a or c or g or t.
  misc_feature (527833)..(527833): n is a or c or g or t.
  misc_feature (527901)..(527901): n is a or c or g or t.
  misc_feature (527978)..(527978): n is a or c or g or t.
  misc_feature (960838)..(960839): n is a or c or g or t.
  misc_feature (960860)..(960861): n is a or c or g or t.
  misc_feature (960872)..(960873): n is a or c or g or t.
  misc_feature (960879)..(960879): n is a or c or g or t.
  misc_feature (960890)..(960890): n is a or c or g or t.
  misc_feature (1250239)..(1250239): n is a or c or g or t.
  misc_feature (1302432)..(1302434): n is a or c or g or t.
  misc_feature (1302471)..(1302471): n is a or c or g or t.
  misc_feature (1302488)..(1302488): n is a or c or g or t.
  misc_feature (1674836)..(1674836): n is a or c or g or t.
VRVLILALGNELMKDDGAGLKAGRILAEKGYNVLEVGTDIFRLANHYNGEERIVIIDAILSDKLKPGEVVHFSGEEIFEKLKAEIRSAHFMGAIDGLKLLMALDERLKRAEIHFIGIVAKEIDLGMELSDEVKAGVQKAVEIAEKLAK

SEQ ID NO: 1145 - protein, 75 aa, Thermococcus kodakaraensis KOD1
  misc_feature (321437)..(321437): n is a or c or g or t.
  misc_feature (527833)..(527833): n is a or c or g or t.
  misc_feature (527901)..(527901): n is a or c or g or t.
  misc_feature (527978)..(527978): n is a or c or g or t.
  misc_feature (960838)..(960839): n is a or c or g or t.
  misc_feature (960860)..(960861): n is a or c or g or t.
  misc_feature (960872)..(960873): n is a or c or g or t.
  misc_feature (960879)..(960879): n is a or c or g or t.
  misc_feature (960890)..(960890): n is a or c or g or t.
  misc_feature (1250239)..(1250239): n is a or c or g or t.
  misc_feature (1302432)..(1302434): n is a or c or g or t.
  misc_feature (1302471)..(1302471): n is a or c or g or t.
  misc_feature (1302488)..(1302488): n is a or c or g or t.
  misc_feature (1674836)..(1674836): n is a or c or g or t.
VLGMYGDRFGGYGQEAPVKVGERYTVKIESLGKGGDGIAKIKGFVIFVPNTQVGDEVEIVINSVKRKFAFASVIE

SEQ ID NO: 1146 - protein, 101 aa, Thermococcus kodakaraensis KOD1
  misc_feature (321437)..(321437): n is a or c or g or t.
  misc_feature (527833)..(527833): n is a or c or g or t.
  misc_feature (527901)..(527901): n is a or c or g or t.
  misc_feature (527978)..(527978): n is a or c or g or t.
  misc_feature (960838)..(960839): n is a or c or g or t.
  misc_feature (960860)..(960861): n is a or c or g or t.
  misc_feature (960872)..(960873): n is a or c or g or t.
  misc_feature (960879)..(960879): n is a or c or g or t.
  misc_feature (960890)..(960890): n is a or c or g or t.
  misc_feature (1250239)..(1250239): n is a or c or g or t.
  misc_feature (1302432)..(1302434): n is a or c or g or t.
  misc_feature (1302471)..(1302471): n is a or c or g or t.
  misc_feature (1302488)..(1302488): n is a or c or g or t.
  misc_feature (1674836)..(1674836): n is a or c or g or t.
VALVAGCMEGGNFVYSKGKIIGPHKELRYSFKGPVDLDVNVSGNGPFTLLIVSSDGSKEIFKRGNVTKVKETVKLPEGSWKVIIRNEGGDSLSLDISLKGK

SEQ ID NO: 1147 - protein, 306 aa, Thermococcus kodakaraensis KOD1
  misc_feature (321437)..(321437): n is a or c or g or t.
  misc_feature (527833)..(527833): n is a or c or g or t.
  misc_feature (527901)..(527901): n is a or c or g or t.
  misc_feature (527978)..(527978): n is a or c or g or t.
  misc_feature (960838)..(960839): n is a or c or g or t.
  misc_feature (960860)..(960861): n is a or c or g or t.
  misc_feature (960872)..(960873): n is a or c or g or t.
  misc_feature (960879)..(960879): n is a or c or g or t.
  misc_feature (960890)..(960890): n is a or c or g or t.
  misc_feature (1250239)..(1250239): n is a or c or g or t.
  misc_feature (1302432)..(1302434): n is a or c or g or t.
  misc_feature (1302471)..(1302471): n is a or c or g or t.
  misc_feature (1302488)..(1302488): n is a or c or g or t.
  misc_feature (1674836)..(1674836): n is a or c or g or t.
VWSLKLEAGNSIRQKKFWLITALMVLIYIMAFYEIQGNLESASNPQEVLAVSLVEYVVAGAFLFIGLYALIAGATALNSDLENGTIRLALSKPIRRAPYLLGKFLGQSVSIIVAILIATLLSFVITKYYGVSLTGKLISDLVLANGLILLAMLQLLALGILISSVIRSQNTALGVALVLFLVTSLVMPQVVDGWAEKKADKEFGIQKRGDFLKLTPEEASAYQQRLEELQEEYHLKYLFYAPQVMMIEAFEDIEKISFNNDGTYTIEYLGVSHSIAKNPAPVLIILGLTPVYLALGLVRFLRMDLR

SEQ ID NO: 1148 - protein, 305 aa, Thermococcus kodakaraensis KOD1
  misc_feature (321437)..(321437): n is a or c or g or t.
  misc_feature (527833)..(527833): n is a or c or g or t.
  misc_feature (527901)..(527901): n is a or c or g or t.
  misc_feature (527978)..(527978): n is a or c or g or t.
  misc_feature (960838)..(960839): n is a or c or g or t.
  misc_feature (960860)..(960861): n is a or c or g or t.
  misc_feature (960872)..(960873): n is a or c or g or t.
  misc_feature (960879)..(960879): n is a or c or g or t.
  misc_feature (960890)..(960890): n is a or c or g or t.
  misc_feature (1250239)..(1250239): n is a or c or g or t.
  misc_feature (1302432)..(1302434): n is a or c or g or t.
  misc_feature (1302471)..(1302471): n is a or c or g or t.
  misc_feature (1302488)..(1302488): n is a or c or g or t.
  misc_feature (1674836)..(1674836): n is a or c or g or t.
VMRVENLVKFYKDVRALDGLNLEVKPGQIYGFLGPNGAGKSTTILSTLGLIFPQQGRIQLFDLEVFRDGKFDENNLVQAKKRIGYMPEHATLWDFLTPVQTLDIIADAFKIPKAEKEKRIKELLDLVGLSEAKNRKVGKFSKGMRQRLLLAQALINDPDLLILDEPMSGLDPKGIAEFKDIIREQRKAGKTVFFSSHILAHVEEICDTVGVIVKGKLIREGSLEEIKREFLEKAGYTIILETSKPVDWSSAPWRASPLGENKYRIVAERDIREELHDYVAKQGAKILTLQIKEPTLEEIFLKMVE

SEQ ID NO: 1149 - protein, 233 aa, Thermococcus kodakaraensis KOD1
  misc_feature (321437)..(321437): n is a or c or g or t.
  misc_feature (527833)..(527833): n is a or c or g or t.
  misc_feature (527901)..(527901): n is a or c or g or t.
  misc_feature (527978)..(527978): n is a or c or g or t.
  misc_feature (960838)..(960839): n is a or c or g or t.
  misc_feature (960860)..(960861): n is a or c or g or t.
  misc_feature (960872)..(960873): n is a or c or g or t.
  misc_feature (960879)..(960879): n is a or c or g or t.
  misc_feature (960890)..(960890): n is a or c or g or t.
  misc_feature (1250239)..(1250239): n is a or c or g or t.
  misc_feature (1302432)..(1302434): n is a or c or g or t.
  misc_feature (1302471)..(1302471): n is a or c or g or t.
  misc_feature (1302488)..(1302488): n is a or c or g or t.
  misc_feature (1674836)..(1674836): n is a or c or g or t.
MAITKNILSPDYLSLSRMTFEHIISSKRLEGFLRHLAEEGVGGVEPLAKGTTSLVFTGVLGGRKVVIKLQRPDSPRSNFEKEAELTKIASTFGVTPPIIGLGEFEGLPYLIREFAEGEPILFADVEKEHLFRIVEKTALLDRLGIDHGQIQGGKHIIIGEDVYLIDFEKAGFRKPNNLTSAMAMIFIGENAISKRVREKFGLDEKFREEMKDALRHYKRTGSLSRLLSLLSGL

SEQ ID NO: 1150 - protein, 443 aa, Thermococcus kodakaraensis KOD1
  misc_feature (321437)..(321437): n is a or c or g or t.
  misc_feature (527833)..(527833): n is a or c or g or t.
  misc_feature (527901)..(527901): n is a or c or g or t.
  misc_feature (527978)..(527978): n is a or c or g or t.
  misc_feature (960838)..(960839): n is a or c or g or t.
  misc_feature (960860)..(960861): n is a or c or g or t.
  misc_feature (960872)..(960873): n is a or c or g or t.
  misc_feature (960879)..(960879): n is a or c or g or t.
  misc_feature (960890)..(960890): n is a or c or g or t.
  misc_feature (1250239)..(1250239): n is a or c or g or t.
  misc_feature (1302432)..(1302434): n is a or c or g or t.
  misc_feature (1302471)..(1302471): n is a or c or g or t.
  misc_feature (1302488)..(1302488): n is a or c or g or t.
  misc_feature (1674836)..(1674836): n is a or c or g or t.
VMAVLPLSDLLIWSFAGVLFGSLISWIPGFHIYNIIALLVAVFGVGELMPVQAFPFFAVGAIVAYAYVSAISSVYFSVADESAVFLLFPTQRYLLLGRGHEAVLLYLIGAVAGTLILVLGMLFVFPKVLPPIYQATSPYITYFLVAIVLFMFMSEWPKEGDRGKTVKERLWLAWRQILGGIFVFFLSGILGFIVTNTNILPATSAYTRLTPMFIGFFGMSWVILNILSNPPMLPQKPEDKVESSIYNTLKASFGGALGGTIAAVYPIITGGMGAMVAGHMTSQRGDDAFIISQGVNRVLYYVGAFSLLFLPNLRLTRGAGAWLVSSLYTPKSYSEYIAAIGVILLASGISFLFTYGLSRLIARSFNVMHIKKVSYFVAAVLVVISYLLTGWMGVVVLFVSTAIGLMAAAFNTRRSYCLGGLILPVLLSMTGHTEVFMHLLGLG

SEQ ID NO: 1151 - protein, 466 aa, Thermococcus kodakaraensis KOD1
  misc_feature (321437)..(321437): n is a or c or g or t.
  misc_feature (527833)..(527833): n is a or c or g or t.
  misc_feature (527901)..(527901): n is a or c or g or t.
  misc_feature (527978)..(527978): n is a or c or g or t.
  misc_feature (960838)..(960839): n is a or c or g or t.
  misc_feature (960860)..(960861): n is a or c or g or t.
  misc_feature (960872)..(960873): n is a or c or g or t.
  misc_feature (960879)..(960879): n is a or c or g or t.
  misc_feature (960890)..(960890): n is a or c or g or t.
  misc_feature (1250239)..(1250239): n is a or c or g or t.
  misc_feature (1302432)..(1302434): n is a or c or g or t.
  misc_feature (1302471)..(1302471): n is a or c or g or t.
  misc_feature (1302488)..(1302488): n is a or c or g or t.
  misc_feature (1674836)..(1674836): n is a or c or g or t.
MRGFTHYISGLAAATFFPALVADIRMGTLAAVIAAASAYFPDFVDFKFGKFFARRDYEIDPAPWDEKKHYAPKLVKIKDLSEKNRYQFFAIEGRVEEILTKGSGTMSYEVFDEKGNVKTVTEEYNTIVFILNDGTGKITVEAFGDDYKIFEEEFGQIEEGKEMLVFGYVDVDPDGSLRFVVSDAPHPQGIADIIAEAIEKAYEEGEKIVKIHNIRLPGDVYRQFWIHLDPPKREVRVEMGPIVTPGGVAIGGEPPEYRKYGIARVNVPFIKTYPKPTRIDSFSGPEIAFRLTKHQGKTVVKDRFLPWHHGFSHSMTMGVIIGAVVFLLAKLFGYSHATDLALASMIGQWLHVFEDQLGFMGSNLFPPITKDVIPGFKLGESGSGLTNFSTAWLMIALMIWNFNRFTDPRPIPISDARLLLYLIWPSIIGFGIAIVRSIRLRKELAKLMDYYTNLEAFEELEEVGGI

SEQ ID NO: 1152 - protein, 150 aa, Thermococcus kodakaraensis KOD1
  misc_feature (321437)..(321437): n is a or c or g or t.
  misc_feature (527833)..(527833): n is a or c or g or t.
  misc_feature (527901)..(527901): n is a or c or g or t.
  misc_feature (527978)..(527978): n is a or c or g or t.
  misc_feature (960838)..(960839): n is a or c or g or t.
  misc_feature (960860)..(960861): n is a or c or g or t.
  misc_feature (960872)..(960873): n is a or c or g or t.
  misc_feature (960879)..(960879): n is a or c or g or t.
  misc_feature (960890)..(960890): n is a or c or g or t.
  misc_feature (1250239)..(1250239): n is a or c or g or t.
  misc_feature (1302432)..(1302434): n is a or c or g or t.
  misc_feature (1302471)..(1302471): n is a or c or g or t.
  misc_feature (1302488)..(1302488): n is a or c or g or t.
  misc_feature (1674836)..(1674836): n is a or c or g or t.
MKELPKGPLDLKKILAEGDPVKKAYLLGYFIAYYGHTDWVGVWRELRDSVLESAEESGVLRKAIDAYRRGKKDGAHDRELAIAQGLYRPLSPEEVEHEVKKIQEIRVLPPQTRIPKMLRVRLTGEPRMLLRSQIMDQVRTLSLPRFLGRR

SEQ ID NO: 1153 - protein, 68 aa, Thermococcus kodakaraensis KOD1
  misc_feature (321437)..(321437): n is a or c or g or t.
  misc_feature (527833)..(527833): n is a or c or g or t.
  misc_feature (527901)..(527901): n is a or c or g or t.
  misc_feature (527978)..(527978): n is a or c or g or t.
  misc_feature (960838)..(960839): n is a or c or g or t.
  misc_feature (960860)..(960861): n is a or c or g or t.
  misc_feature (960872)..(960873): n is a or c or g or t.
  misc_feature (960879)..(960879): n is a or c or g or t.
  misc_feature (960890)..(960890): n is a or c or g or t.
  misc_feature (1250239)..(1250239): n is a or c or g or t.
  misc_feature (1302432)..(1302434): n is a or c or g or t.
  misc_feature (1302471)..(1302471): n is a or c or g or t.
  misc_feature (1302488)..(1302488): n is a or c or g or t.
  misc_feature (1674836)..(1674836): n is a or c or g or t.
VNSAIKSIEKTPEEEGAKFELHTIATTTAKASNPNISFEVRSHSLNEGAESTKKNATIPRLRSLLWAV

SEQ ID NO: 1154 - protein, 248 aa, Thermococcus kodakaraensis KOD1
  misc_feature (321437)..(321437): n is a or c or g or t.
  misc_feature (527833)..(527833): n is a or c or g or t.
  misc_feature (527901)..(527901): n is a or c or g or t.
  misc_feature (527978)..(527978): n is a or c or g or t.
  misc_feature (960838)..(960839): n is a or c or g or t.
  misc_feature (960860)..(960861): n is a or c or g or t.
  misc_feature (960872)..(960873): n is a or c or g or t.
  misc_feature (960879)..(960879): n is a or c or g or t.
  misc_feature (960890)..(960890): n is a or c or g or t.
  misc_feature (1250239)..(1250239): n is a or c or g or t.
  misc_feature (1302432)..(1302434): n is a or c or g or t.
  misc_feature (1302471)..(1302471): n is a or c or g or t.
  misc_feature (1302488)..(1302488): n is a or c or g or t.
  misc_feature (1674836)..(1674836): n is a or c or g or t.
MNAIDPREIAINARLEGVKRIIPVVSGKGGVGKSLVSTTLALVLAEKGYRVGLLDLDFHGASDHVILGFEPKEFPEEDRGVVPPTVHGIKFMTIAYYTEDRPTPLRGKEISDALIELLTITRWDELDYLVIDMPPGLGDQLLDVLRFLKRGEFLVVATPSKLSLNVVRKLIELLKEEGHKVIGVVENMKLRSEQLDDEKDVEKLAEEFGVPYLVGIPFYPDLDAKVGNVEELMKTEFAGKVRELAGRL

SEQ ID NO: 1155 - protein, 110 aa, Thermococcus kodakaraensis KOD1
  misc_feature (321437)..(321437): n is a or c or g or t.
  misc_feature (527833)..(527833): n is a or c or g or t.
  misc_feature (527901)..(527901): n is a or c or g or t.
  misc_feature (527978)..(527978): n is a or c or g or t.
  misc_feature (960838)..(960839): n is a or c or g or t.
  misc_feature (960860)..(960861): n is a or c or g or t.
  misc_feature (960872)..(960873): n is a or c or g or t.
  misc_feature (960879)..(960879): n is a or c or g or t.
  misc_feature (960890)..(960890): n is a or c or g or t.
  misc_feature (1250239)..(1250239): n is a or c or g or t.
  misc_feature (1302432)..(1302434): n is a or c or g or t.
  misc_feature (1302471)..(1302471): n is a or c or g or t.
  misc_feature (1302488)..(1302488): n is a or c or g or t.
  misc_feature (1674836)..(1674836): n is a or c or g or t.
MSEAVNPKLYSIEKLLEDKDKRLLVSEVVLKLAEALGVTVEDFLGYMEWKENMGKLERAEKEAQIPESIPVEFPTEDAPEGLEEALNEIEEDIQKWQKIERRLKEMGLEL

SEQ ID NO: 1156 - protein, 372 aa, Thermococcus kodakaraensis KOD1
  misc_feature (321437)..(321437): n is a or c or g or t.
  misc_feature (527833)..(527833): n is a or c or g or t.
  misc_feature (527901)..(527901): n is a or c or g or t.
  misc_feature (527978)..(527978): n is a or c or g or t.
  misc_feature (960838)..(960839): n is a or c or g or t.
  misc_feature (960860)..(960861): n is a or c or g or t.
  misc_feature (960872)..(960873): n is a or c or g or t.
  misc_feature (960879)..(960879): n is a or c or g or t.
  misc_feature (960890)..(960890): n is a or c or g or t.
  misc_feature (1250239)..(1250239): n is a or c or g or t.
  misc_feature (1302432)..(1302434): n is a or c or g or t.
  misc_feature (1302471)..(1302471): n is a or c or g or t.
  misc_feature (1302488)..(1302488): n is a or c or g or t.
  misc_feature (1674836)..(1674836): n is a or c or g or t.
MEEPFEAYRSREVAMKLVEKIREEAKTLDGEIRIMHVCGTHEDTVTRHGIRSLLPENVKVVSGPGCPVCITPVEDIVAMQLIMRKAREEGEEIILTTFGDMYKIPTPMGSFADLKSEGFDVRIVYGIFDTYRIAKENPDKTVVHFSPGFETTTAPAAGMLNVAAQEELENFKIYSVHRLTPPAVEVLLKQGTVFQGLIAPGHVSTIIGVKGWEYLTEKYGIPQVVAGFEPNDVLMAILMLIRMYKEGEARIINEYERAVKYEGNVVAQKMIDKFFEVVDAKWRALGVFPKSGLELRKEWKDFEIRSFYKVEVPKNLPDLEKGCRCGAVLRGLALPTDCPLFGKTCTPRHPVGPCMVSYEGTCQIFYKYGVLF

SEQ ID NO: 1157 - protein, 80 aa, Thermococcus kodakaraensis KOD1
  misc_feature (321437)..(321437): n is a or c or g or t.
  misc_feature (527833)..(527833): n is a or c or g or t.
  misc_feature (527901)..(527901): n is a or c or g or t.
  misc_feature (527978)..(527978): n is a or c or g or t.
  misc_feature (960838)..(960839): n is a or c or g or t.
  misc_feature (960860)..(960861): n is a or c or g or t.
  misc_feature (960872)..(960873): n is a or c or g or t.
  misc_feature (960879)..(960879): n is a or c or g or t.
  misc_feature (960890)..(960890): n is a or c or g or t.
  misc_feature (1250239)..(1250239): n is a or c or g or t.
  misc_feature (1302432)..(1302434): n is a or c or g or t.
  misc_feature (1302471)..(1302471): n is a or c or g or t.
  misc_feature (1302488)..(1302488): n is a or c or g or t.
  misc_feature (1674836)..(1674836): n is a or c or g or t.
MGKVITIRVPDWVSEDFVRRVERLVEEEIERAFASGRVDRETYLRFIETYSTTDDVLLENDEEMLSEMRKKEKARINGSY

SEQ ID NO: 1158 - protein, 108 aa, Thermococcus kodakaraensis KOD1
  misc_feature (321437)..(321437): n is a or c or g or t.
  misc_feature (527833)..(527833): n is a or c or g or t.
  misc_feature (527901)..(527901): n is a or c or g or t.
  misc_feature (527978)..(527978): n is a or c or g or t.
  misc_feature (960838)..(960839): n is a or c or g or t.
  misc_feature (960860)..(960861): n is a or c or g or t.
  misc_feature (960872)..(960873): n is a or c or g or t.
  misc_feature (960879)..(960879): n is a or c or g or t.
  misc_feature (960890)..(960890): n is a or c or g or t.
  misc_feature (1250239)..(1250239): n is a or c or g or t.
  misc_feature (1302432)..(1302434): n is a or c or g or t.
  misc_feature (1302471)..(1302471): n is a or c or g or t.
  misc_feature (1302488)..(1302488): n is a or c or g or t.
  misc_feature (1674836)..(1674836): n is a or c or g or t.
MPVIPKEELLKILRDVKARLQEILGENLVEIILFGSYARGEAEEWSDVDVLVVVKRWPTLEELDRMAEATNKYAIEKGVAISLIPYIEKPDMSSDPLILNVMREGIKV

SEQ ID NO: 1159 - protein, 546 aa, Thermococcus kodakaraensis KOD1
  misc_feature (321437)..(321437): n is a or c or g or t.
  misc_feature (527833)..(527833): n is a or c or g or t.
  misc_feature (527901)..(527901): n is a or c or g or t.
  misc_feature (527978)..(527978): n is a or c or g or t.
  misc_feature (960838)..(960839): n is a or c or g or t.
  misc_feature (960860)..(960861): n is a or c or g or t.
  misc_feature (960872)..(960873): n is a or c or g or t.
  misc_feature (960879)..(960879): n is a or c or g or t.
  misc_feature (960890)..(960890): n is a or c or g or t.
  misc_feature (1250239)..(1250239): n is a or c or g or t.
  misc_feature (1302432)..(1302434): n is a or c or g or t.
  misc_feature (1302471)..(1302471): n is a or c or g or t.
  misc_feature (1302488)..(1302488): n is a or c or g or t.
  misc_feature (1674836)..(1674836): n is a or c or g or t.
MTPIALITLELFGRVNNLWANLKIVHNVIIKGETMLSLALLAVIKGSDLIVDKEGLKEDILAWRLKDVKALAEKYDKVFAVLVEFLYDDNPHVRANVLQIIKDMISEGKMSRPRLQRVLPRILELARDKDERVALKAIEVINTLLESGDLSEEDYERVMETLQDVLKSGVPILGEYAAEGLGKLGANVVAIAYKLINWLFSLIGSSKKRDVQSAAITALTEIASKTTDSNILNRVFDGITDLLSHPDPYVVERALYSIDRLLTREKELSTRNKLKAVSKIKELRGDVKLGLLASQVMEKLEKATNIAEETIESEGVTKALEVSQYSIDDVEKLLDAGKADIVAEMAKLDPAVMEKVLSMLESEDYTRRMDALWIVSKLTSHLTPTDAYRILPILGEFLKSKNAWARETAAKTLADIHALYPGTSKFFASLLDALLKSGNPRDIEGALEFMARLSEKIPSEDMREKITKLILRLLDDEKARGVALKFLAREAQKLLELDTEVLFTIKDKLKELYGSEGGKYDEIIAGLIDVIDDILKMRRQGIVANV

SEQ ID NO: 1160 - protein, 155 aa, Thermococcus kodakaraensis KOD1
  misc_feature (321437)..(321437): n is a or c or g or t.
  misc_feature (527833)..(527833): n is a or c or g or t.
  misc_feature (527901)..(527901): n is a or c or g or t.
  misc_feature (527978)..(527978): n is a or c or g or t.
  misc_feature (960838)..(960839): n is a or c or g or t.
  misc_feature (960860)..(960861): n is a or c or g or t.
  misc_feature (960872)..(960873): n is a or c or g or t.
  misc_feature (960879)..(960879): n is a or c or g or t.
  misc_feature (960890)..(960890): n is a or c or g or t.
  misc_feature (1250239)..(1250239): n is a or c or g or t.
  misc_feature (1302432)..(1302434): n is a or c or g or t.
  misc_feature (1302471)..(1302471): n is a or c or g or t.
  misc_feature (1302488)..(1302488): n is a or c or g or t.
  misc_feature (1674836)..(1674836): n is a or c or g or t.
MRPEFGLVYLPLSLAVVKKRARPFVGGSVVAFAWTYPLQDDLRYILSLLGLVLFLLGWPFERQPVKFWERFVNAVIGGTALAIAVGAYQTGEDFALLGIPVLLLILKNRVLASAGLLPASALYLIGSYAVPENLKLALWVITLVYSLHHLRKLAR

SEQ ID NO: 1161 - protein, 218 aa, Thermococcus kodakaraensis KOD1
  misc_feature (321437)..(321437): n is a or c or g or t.
  misc_feature (527833)..(527833): n is a or c or g or t.
  misc_feature (527901)..(527901): n is a or c or g or t.
  misc_feature (527978)..(527978): n is a or c or g or t.
  misc_feature (960838)..(960839): n is a or c or g or t.
  misc_feature (960860)..(960861): n is a or c or g or t.
  misc_feature (960872)..(960873): n is a or c or g or t.
  misc_feature (960879)..(960879): n is a or c or g or t.
  misc_feature (960890)..(960890): n is a or c or g or t.
  misc_feature (1250239)..(1250239): n is a or c or g or t.
  misc_feature (1302432)..(1302434): n is a or c or g or t.
  misc_feature (1302471)..(1302471): n is a or c or g or t.
  misc_feature (1302488)..(1302488): n is a or c or g or t.
  misc_feature (1674836)..(1674836): n is a or c or g or t.
VLRMSLFGGKETDVFEAIDKHLDVVENALRAFRELVGAYLDGDFNRAKELEEEVSRFETEADGLRRSIELMLYEGAFLPVSRGDYVRLSELIDQVADAAESASHTLILAKPKVPTEVKGDILGLVDSAIETFKILKEAVKALNEDVDKALELAKKTEDAEESADKIEYDVKEKVFESETITTYAKLIWNQVLTKIGDIADRAEDASDQVMLMAIKRRG

SEQ ID NO: 1162 - protein, 304 aa, Thermococcus kodakaraensis KOD1
  misc_feature (321437)..(321437): n is a or c or g or t.
  misc_feature (527833)..(527833): n is a or c or g or t.
  misc_feature (527901)..(527901): n is a or c or g or t.
  misc_feature (527978)..(527978): n is a or c or g or t.
  misc_feature (960838)..(960839): n is a or c or g or t.
  misc_feature (960860)..(960861): n is a or c or g or t.
  misc_feature (960872)..(960873): n is a or c or g or t.
  misc_feature (960879)..(960879): n is a or c or g or t.
  misc_feature (960890)..(960890): n is a or c or g or t.
  misc_feature (1250239)..(1250239): n is a or c or g or t.
  misc_feature (1302432)..(1302434): n is a or c or g or t.
  misc_feature (1302471)..(1302471): n is a or c or g or t.
  misc_feature (1302488)..(1302488): n is a or c or g or t.
  misc_feature (1674836)..(1674836): n is a or c or g or t.
MKVLVAAPLHEKAIEVLKNAGFEVVYEEYPDEDRLVELVKDVDAIIVRSKPKVTRKVIEAAPKLKVIGRAGVGLDNIDLKAAEERGIKVVNSPGASSRSVAELAIGLIFAVARKIAFADRKMREGVWAKKQCMGIELEGKTIGVVGFGRIGYQVAKIANALGMKVLFYDPYPNEERAKEVGGKFADLETLLKESDVVTLHVPLVDATYHLINEERLKLMKPTAILINAARGAVVDTDALVKALQEGWIAGAGLDVFEEEPLPADHPLTKLDNVVLTPHIGASTVEAQMRAGVEVAEKIVEALKG

SEQ ID NO: 1163 - protein, 216 aa, Thermococcus kodakaraensis KOD1
  misc_feature (321437)..(321437): n is a or c or g or t.
  misc_feature (527833)..(527833): n is a or c or g or t.
  misc_feature (527901)..(527901): n is a or c or g or t.
  misc_feature (527978)..(527978): n is a or c or g or t.
  misc_feature (960838)..(960839): n is a or c or g or t.
  misc_feature (960860)..(960861): n is a or c or g or t.
  misc_feature (960872)..(960873): n is a or c or g or t.
  misc_feature (960879)..(960879): n is a or c or g or t.
  misc_feature (960890)..(960890): n is a or c or g or t.
  misc_feature (1250239)..(1250239): n is a or c or g or t.
  misc_feature (1302432)..(1302434): n is a or c or g or t.
  misc_feature (1302471)..(1302471): n is a or c or g or t.
  misc_feature (1302488)..(1302488): n is a or c or g or t.
  misc_feature (1674836)..(1674836): n is a or c or g or t.
VKAGIGSPYLGEIERAIIEATRRATLEIPLRPNAVDVLTGRNSGDNTGKGVPVIRWELVEGSDVEIAVLPKGGGSENCSALAMLTPAQGWEGVKRFVLERVTECGGKPCPPIILGIGVGGGADYSLTLAKKALLRKVGERNPDERIAELEEELLTEVNSLGVGPMGMGGKTTTLDVKIEIAHRHPASFPVGLVVQCWANRRAFLRIKADGRVEVWQ

SEQ ID NO: 1164 - protein, 116 aa, Thermococcus kodakaraensis KOD1
  misc_feature (110)..(110): The 'Xaa' at location 110 stands for Lys, Arg, Thr, or Ile.
  misc_feature (321437)..(321437): n is a or c or g or t.
  misc_feature (527833)..(527833): n is a or c or g or t.
  misc_feature (527901)..(527901): n is a or c or g or t.
  misc_feature (527978)..(527978): n is a or c or g or t.
  misc_feature (960838)..(960839): n is a or c or g or t.
  misc_feature (960860)..(960861): n is a or c or g or t.
  misc_feature (960872)..(960873): n is a or c or g or t.
  misc_feature (960879)..(960879): n is a or c or g or t.
  misc_feature (960890)..(960890): n is a or c or g or t.
  misc_feature (1250239)..(1250239): n is a or c or g or t.
  misc_feature (1302432)..(1302434): n is a or c or g or t.
  misc_feature (1302471)..(1302471): n is a or c or g or t.
  misc_feature (1302488)..(1302488): n is a or c or g or t.
  misc_feature (1674836)..(1674836): n is a or c or g or t.
VVEMEETRFRRRKPAVERKIAEIKEDDTRVSLIGKAFKVDKMDYTFWLDDGTGVILVESEENVLPENGQIVRVIGRVIREEEGIHIFGEVVQDFSDADLEALEEVRELEXEDPSEG

SEQ ID NO: 1165 - protein, 268 aa, Thermococcus kodakaraensis KOD1
  misc_feature (321437)..(321437): n is a or c or g or t.
  misc_feature (527833)..(527833): n is a or c or g or t.
  misc_feature (527901)..(527901): n is a or c or g or t.
  misc_feature (527978)..(527978): n is a or c or g or t.
  misc_feature (960838)..(960839): n is a or c or g or t.
  misc_feature (960860)..(960861): n is a or c or g or t.
  misc_feature (960872)..(960873): n is a or c or g or t.
  misc_feature (960879)..(960879): n is a or c or g or t.
  misc_feature (960890)..(960890): n is a or c or g or t.
  misc_feature (1250239)..(1250239): n is a or c or g or t.
  misc_feature (1302432)..(1302434): n is a or c or g or t.
  misc_feature (1302471)..(1302471): n is a or c or g or t.
  misc_feature (1302488)..(1302488): n is a or c or g or t.
  misc_feature (1674836)..(1674836): n is a or c or g or t.
MKKRLPASRVYIRDILEGYYVRSDGDFEPNYLITKDARKVYRVKVVATVVREPVISDDETYGKFQIDDGTGTIWVLGFRDDTRFIRLVKKGDLVQIIGKVAEWRDDKQILVEGVARVSPNFWILHRFETLKEKVEHAEKAKIAFEIYDRYGITAKAKVIAKNKGVDEELLQTIDELYTLMLEQRTLEEELFEEETEEEEEKTEENPEVEKAKEAIMNLLREKGKALSHKFIVKKLSSEFDEEIIEEAITQLLADGEIYEPEIGFYEPL

SEQ ID NO: 1166 - protein, 157 aa, Thermococcus kodakaraensis KOD1
  misc_feature (321437)..(321437): n is a or c or g or t.
  misc_feature (527833)..(527833): n is a or c or g or t.
  misc_feature (527901)..(527901): n is a or c or g or t.
  misc_feature (527978)..(527978): n is a or c or g or t.
  misc_feature (960838)..(960839): n is a or c or g or t.
  misc_feature (960860)..(960861): n is a or c or g or t.
  misc_feature (960872)..(960873): n is a or c or g or t.
  misc_feature (960879)..(960879): n is a or c or g or t.
  misc_feature (960890)..(960890): n is a or c or g or t.
  misc_feature (1250239)..(1250239): n is a or c or g or t.
  misc_feature (1302432)..(1302434): n is a or c or g or t.
  misc_feature (1302471)..(1302471): n is a or c or g or t.
  misc_feature (1302488)..(1302488): n is a or c or g or t.
  misc_feature (1674836)..(1674836): n is a or c or g or t.
VKLMNEGGTLTPRQLKLLKKLYQDGRTIEVHTVEKTQDELSKELGITRQALSNHLKVLKELGYIRTGRGFIDLTDKALELLGEKKGDVFVFVKIEPTKRKQVYEAIRKLNLKKIYRVTGDIDLIIEADKGRLDEILEEIASLDGVKETNTHLVLETL

SEQ ID NO: 1167 - protein, 216 aa, Thermococcus kodakaraensis KOD1
  misc_feature (321437)..(321437): n is a or c or g or t.
  misc_feature (527833)..(527833): n is a or c or g or t.
  misc_feature (527901)..(527901): n is a or c or g or t.
  misc_feature (527978)..(527978): n is a or c or g or t.
  misc_feature (960838)..(960839): n is a or c or g or t.
  misc_feature (960860)..(960861): n is a or c or g or t.
  misc_feature (960872)..(960873): n is a or c or g or t.
  misc_feature (960879)..(960879): n is a or c or g or t.
  misc_feature (960890)..(960890): n is a or c or g or t.
  misc_feature (1250239)..(1250239): n is a or c or g or t.
  misc_feature (1302432)..(1302434): n is a or c or g or t.
  misc_feature (1302471)..(1302471): n is a or c or g or t.
  misc_feature (1302488)..(1302488): n is a or c or g or t.
  misc_feature (1674836)..(1674836): n is a or c or g or t.
VEGDAKANQLINKFVISLTEGKILGYVTDINVEVEGNKFYFILKMKEVENLGSGQSVFTSERKLKISPDDIVNVGPHVIILGNGKVPPLREIERLHQIAEEYNNLVSELEAKEKLIEELKEENYRLKRELEELQRELRKYQVMKEDFENLKEQLIRQEGQLEMARDYIRLLEGMRGDIDKIKSTVEALIEKQLEEVVRGIIDEELNARGLKKTSFL

SEQ ID NO: 1168 - protein, 413 aa, Thermococcus kodakaraensis KOD1
  misc_feature (321437)..(321437): n is a or c or g or t.
  misc_feature (527833)..(527833): n is a or c or g or t.
  misc_feature (527901)..(527901): n is a or c or g or t.
  misc_feature (527978)..(527978): n is a or c or g or t.
  misc_feature (960838)..(960839): n is a or c or g or t.
  misc_feature (960860)..(960861): n is a or c or g or t.
  misc_feature (960872)..(960873): n is a or c or g or t.
  misc_feature (960879)..(960879): n is a or c or g or t.
  misc_feature (960890)..(960890): n is a or c or g or t.
  misc_feature (1250239)..(1250239): n is a or c or g or t.
  misc_feature (1302432)..(1302434): n is a or c or g or t.
  misc_feature (1302471)..(1302471): n is a or c or g or t.
  misc_feature (1302488)..(1302488): n is a or c or g or t.
  misc_feature (1674836)..(1674836): n is a or c or g or t.
VREMAKKKEFRQAEVNIGMVGHVDHGKTTLTKALTGIWTDTHSEELRRGITIKIGFADAEIRKCPHCGKYSTSPVCPYCGHETEFERRVSFIDAPGHEALMTTMLAGASLMDGAVLVIAANEGVMPQTREHLMALQIVGNRNIVIALNKIELVDREKVMERYQEIKEFVKGTVAENAPIIPISALHGANVDVLLAAIEEFIPTPKRDPNKPPKMLVLRSFDVNKPGTPPEKLVGGVIGGSIVQGKLRVGDEIEIRPGVPYEEHGRIKYEPITTEITSLQAGGRFVEEAYPGGLVGVGTKLDPFLTKGDLMAGNVVGKPGQLPPVWDELTLEVHLLERVVGTEEELRVEPIKRREVLLLNVGTARTMGLVTGLGKDTVELKLQIPVCAEVGDRVAISRQVGSRWRLIGYGFIRE

SEQ ID NO: 1169 - protein, 143 aa, Thermococcus kodakaraensis KOD1
  misc_feature (321437)..(321437): n is a or c or g or t.
  misc_feature (527833)..(527833): n is a or c or g or t.
  misc_feature (527901)..(527901): n is a or c or g or t.
  misc_feature (527978)..(527978): n is a or c or g or t.
  misc_feature (960838)..(960839): n is a or c or g or t.
  misc_feature (960860)..(960861): n is a or c or g or t.
  misc_feature (960872)..(960873): n is a or c or g or t.
  misc_feature (960879)..(960879): n is a or c or g or t.
  misc_feature (960890)..(960890): n is a or c or g or t.
  misc_feature (1250239)..(1250239): n is a or c or g or t.
  misc_feature (1302432)..(1302434): n is a or c or g or t.
  misc_feature (1302471)..(1302471): n is a or c or g or t.
  misc_feature (1302488)..(1302488): n is a or c or g or t.
  misc_feature (1674836)..(1674836): n is a or c or g or t.
VVLMSESRRREWLVVPDTNFLLVPGQFGVDIISELHRILDVKFRVVVPNVVLDELNVIERKSRGRDLMAVRMAKKLAERFETVEIGRFGERPIDDQIFDFAVRNERVIVCTNDKGLKKRLREKGVPVVYLRSKKILELEGMLE

SEQ ID NO: 1170 - protein, 607 aa, Thermococcus kodakaraensis KOD1
  misc_feature (321437)..(321437): n is a or c or g or t.
  misc_feature (527833)..(527833): n is a or c or g or t.
  misc_feature (527901)..(527901): n is a or c or g or t.
  misc_feature (527978)..(527978): n is a or c or g or t.
  misc_feature (960838)..(960839): n is a or c or g or t.
  misc_feature (960860)..(960861): n is a or c or g or t.
  misc_feature (960872)..(960873): n is a or c or g or t.
  misc_feature (960879)..(960879): n is a or c or g or t.
  misc_feature (960890)..(960890): n is a or c or g or t.
  misc_feature (1250239)..(1250239): n is a or c or g or t.
  misc_feature (1302432)..(1302434): n is a or c or g or t.
  misc_feature (1302471)..(1302471): n is a or c or g or t.
  misc_feature (1302488)..(1302488): n is a or c or g or t.
  misc_feature (1674836)..(1674836): n is a or c or g or t.
MKTLTTTLVVLLLVGLVLASGCTGGGNNEGGPSYTSHEEISGGSSGSTSEETTGTSESYSATWQTPWDAYHPISLNGGSYYITEVEYTFTLKTSDGEKTFNIIKKRGYVKAHVYAEENGEKKDLGEFNLFAYYGKIIPVTGNGTPFEYIVMVRERSEDSDKYFLEPVPNFGVLTTGSAVVAEAKSGNSYFYWSNPGAIGQYSELPYTEGDLNEVLGDMGSYLYTFWLSMLSSGVWSGLEDRDLMKAEEYDYSFPPFAYHYRIDPDGTVTFDGNDFGVSNVEWSYSFGGVTLQGRAEISPALPIPVETEGTFVDLSSGAKAYSKIKIEGLKLSKEFGGISVSIEKPTSEGTSTETASETQTETSAPSESSQNWQRAWDASEPIEIHGNQYLLKSVAYDITYKTQNWEVHYTMERGYNETDDGYVAYAIVHMDDGSTYRFEVYTSNIDEYTGWVLWIPSVFELIESGSSFEKYTVQGPNCGYTYGESGISGDMNCGMEITNSLFDQIWDVYNGFAGGIYGDVVYVADLSSNGEGYTVQKDGSVSFAGMTFDEYVIQWSGLMQGYVTANGKTAVVPELPIPVEIEASLAMPEGAMYFHITVKDVELAPAS

SEQ ID NO: 1171 - protein, 87 aa, Thermococcus kodakaraensis KOD1
  misc_feature (321437)..(321437): n is a or c or g or t.
  misc_feature (527833)..(527833): n is a or c or g or t.
  misc_feature (527901)..(527901): n is a or c or g or t.
  misc_feature (527978)..(527978): n is a or c or g or t.
  misc_feature (960838)..(960839): n is a or c or g or t.
  misc_feature (960860)..(960861): n is a or c or g or t.
  misc_feature (960872)..(960873): n is a or c or g or t.
  misc_feature (960879)..(960879): n is a or c or g or t.
  misc_feature (960890)..(960890): n is a or c or g or t.
  misc_feature (1250239)..(1250239): n is a or c or g or t.
  misc_feature (1302432)..(1302434): n is a or c or g or t.
  misc_feature (1302471)..(1302471): n is a or c or g or t.
  misc_feature (1302488)..(1302488): n is a or c or g or t.
  misc_feature (1674836)..(1674836): n is a or c or g or t.
VLRMGSELIRILKEKHSFLSVMLESIERAISNIEEGKNPEEVYYALTTFLGEFPTKAMLQKLADEKGLGIKVKDKESAIEVIKRLSG

SEQ ID NO: 1172 - protein, 204 aa, Thermococcus kodakaraensis KOD1
  misc_feature (321437)..(321437): n is a or c or g or t.
  misc_feature (527833)..(527833): n is a or c or g or t.
  misc_feature (527901)..(527901): n is a or c or g or t.
  misc_feature (527978)..(527978): n is a or c or g or t.
  misc_feature (960838)..(960839): n is a or c or g or t.
  misc_feature (960860)..(960861): n is a or c or g or t.
  misc_feature (960872)..(960873): n is a or c or g or t.
  misc_feature (960879)..(960879): n is a or c or g or t.
  misc_feature (960890)..(960890): n is a or c or g or t.
  misc_feature (1250239)..(1250239): n is a or c or g or t.
  misc_feature (1302432)..(1302434): n is a or c or g or t.
  misc_feature (1302471)..(1302471): n is a or c or g or t.
  misc_feature (1302488)..(1302488): n is a or c or g or t.
  misc_feature (1674836)..(1674836): n is a or c or g or t.
MRKVGIAALVLLLLGATLPSASAGDLINYIWDTRTYQHPYPTDIRPGDLVYGHSPDLFNAIIPGFWVHVAIVAWYNDTIDDWMVIEAKIGKGIIISPLREFLSRYDIVALQRVKTTDDVRQKAVEFAYQQLGKPYNYNYIGKPEVYDDKYYCSQLVWAAYLVASNYQINLDENDGGWSWKYFYSVAPQEVYDDPMTYTLYYDEA

SEQ ID NO: 1173 - protein, 242 aa, Thermococcus kodakaraensis KOD1
  misc_feature (321437)..(321437): n is a or c or g or t.
  misc_feature (527833)..(527833): n is a or c or g or t.
  misc_feature (527901)..(527901): n is a or c or g or t.
  misc_feature (527978)..(527978): n is a or c or g or t.
  misc_feature (960838)..(960839): n is a or c or g or t.
  misc_feature (960860)..(960861): n is a or c or g or t.
  misc_feature (960872)..(960873): n is a or c or g or t.
  misc_feature (960879)..(960879): n is a or c or g or t.
  misc_feature (960890)..(960890): n is a or c or g or t.
  misc_feature (1250239)..(1250239): n is a or c or g or t.
  misc_feature (1302432)..(1302434): n is a or c or g or t.
  misc_feature (1302471)..(1302471): n is a or c or g or t.
  misc_feature (1302488)..(1302488): n is a or c or g or t.
  misc_feature (1674836)..(1674836): n is a or c or g or t.
VNMYLPPFPLLGGLLAWATVYFLGFKKQKWAELILGAVAFILAMVVQNPIQQLPLIGIGIRSNADVIARGTVFTLGVALWLGLVAGFVQEGVKYFLVKDKSPNTALFVGLGFGIMEVLLIVITPIIAVAAAGGKLDVPALQALLSMVERYFAVLFHVGTTVYLAYAARNGFGKKGFLMMAILHGFVDTIAAYAQFLFLENKVLAMKFTIGLEVIFAVIAIALIAYTLPLARIEEPEEEKVIW

SEQ ID NO: 1174 - protein, 176 aa, Thermococcus kodakaraensis KOD1
  misc_feature (321437)..(321437): n is a or c or g or t.
  misc_feature (527833)..(527833): n is a or c or g or t.
  misc_feature (527901)..(527901): n is a or c or g or t.
  misc_feature (527978)..(527978): n is a or c or g or t.
  misc_feature (960838)..(960839): n is a or c or g or t.
  misc_feature (960860)..(960861): n is a or c or g or t.
  misc_feature (960872)..(960873): n is a or c or g or t.
  misc_feature (960879)..(960879): n is a or c or g or t.
  misc_feature (960890)..(960890): n is a or c or g or t.
  misc_feature (1250239)..(1250239): n is a or c or g or t.
  misc_feature (1302432)..(1302434): n is a or c or g or t.
  misc_feature (1302471)..(1302471): n is a or c or g or t.
  misc_feature (1302488)..(1302488): n is a or c or g or t.
  misc_feature (1674836)..(1674836): n is a or c or g or t.
MLSSFFLPLYGMFVLLIGGVAVVLAIGYIVARREYELEDISREAPEKPTKSIEPPKLGKHLAAQLVFALLLVLMSPKLPRDMAIVLGSVMALFIALTLLASRPLVFQLAPKFSGIMARGFAKAITLVSALLTFEAFLAWMGFEDDVLGILLLPISLLVIFYAAYVMLTSAYREGYY

SEQ ID NO: 1175 - protein, 848 aa, Thermococcus kodakaraensis KOD1
  misc_feature (321437)..(321437): n is a or c or g or t.
  misc_feature (527833)..(527833): n is a or c or g or t.
  misc_feature (527901)..(527901): n is a or c or g or t.
  misc_feature (527978)..(527978): n is a or c or g or t.
  misc_feature (960838)..(960839): n is a or c or g or t.
  misc_feature (960860)..(960861): n is a or c or g or t.
  misc_feature (960872)..(960873): n is a or c or g or t.
  misc_feature (960879)..(960879): n is a or c or g or t.
  misc_feature (960890)..(960890): n is a or c or g or t.
  misc_feature (1250239)..(1250239): n is a or c or g or t.
  misc_feature (1302432)..(1302434): n is a or c or g or t.
  misc_feature (1302471)..(1302471): n is a or c or g or t.
  misc_feature (1302488)..(1302488): n is a or c or g or t.
  misc_feature (1674836)..(1674836): n is a or c or g or t.
MFYPHQRYWVMMMARKKKVEDEVKELEEFEELDVEESLSSSDKQSKPEKKISALEDLPGVGPATAEKLREAGYDTIEAIAVASPLELKEIAGISEGAALKIIQAAREAANIGTFMRADEYMKRRTTIGKISTGSKALDKLLGGGIETQAITEVFGEFGSGKCFAKDTKVYYENDTLVHFESIEDMYHKYASLGREVPFDNGYAVPLETVSVYTFDPKTGEVKRTKASYIYREKVEKLAEIRLSNGYLLRITLLHPVLVFRNGLQWVPAGMIKPGDLIVGIRSVPANAATIEESEAYFLGLFVAEGTSNPLSITTGSEELKDFIVSFIEDHDGYTPTVEVRRGLYRILFRKKTAEWLGELATSNASTKVVPERVLNAGESAIAAFLAGYLDGDGYLTESIVELVTKSRELADGLVFLLKRLGITPRISQKTIEGSVYYRIYITGEDRKTFEKVLEKSRIKPGEMNEGGVGRYPPALGKFLGKLYSEFRLPKRDNETAYHILTRSRNVWFTEKTLSRIEEYFREALEKLSEARKALEMGDKPELPFPWTAITKYGFTDRQVANYRTRGLPKRPELKEKVVSALLKEIERLEGVAKLALETIELARRLEFHEVSSVEVVDYNDWVYDLVIPETHNFIAPNGLVLHNTQLAHTLAVMVQKPPEEGGLGGSVIWIDTENTFRPERIKQIAENRGLDPEETLKNIYVARAFNSNHQMLLVEKAEEIIKEKAESDRPVKLLVVDSLMAHFRAEYVGRGTLAERQQKLAKHLADLHRLADLYDIAVFVTNQVQAKPDAFFGDPTRPVGGHILAHSATLRVYLRKGKAGKRVARLIDSPHLPEGEAVFRITEKGVED

SEQ ID NO: 1176 - protein, 336 aa, Thermococcus kodakaraensis KOD1
  misc_feature (321437)..(321437): n is a or c or g or t.
  misc_feature (527833)..(527833): n is a or c or g or t.
  misc_feature (527901)..(527901): n is a or c or g or t.
  misc_feature (527978)..(527978): n is a or c or g or t.
  misc_feature (960838)..(960839): n is a or c or g or t.
  misc_feature (960860)..(960861): n is a or c or g or t.
  misc_feature (960872)..(960873): n is a or c or g or t.
  misc_feature (960879)..(960879): n is a or c or g or t.
  misc_feature (960890)..(960890): n is a or c or g or t.
  misc_feature (1250239)..(1250239): n is a or c or g or t.
  misc_feature (1302432)..(1302434): n is a or c or g or t.
  misc_feature (1302471)..(1302471): n is a or c or g or t.
  misc_feature (1302488)..(1302488): n is a or c or g or t.
  misc_feature (1674836)..(1674836): n is a or c or g or t.
MNFTVYLPSWAISSEGIEALKSNLSLALSVYGNLTGIERPTDRFFIIFHPLFWRFSQETYGYTARGINYFGTLVLPYDNDLLTTLNNYQLNLFHELGHEWFGHYAGFGLFVETPTQFLMLEAYSRSVPQDYFYDYYMDEVEKQVVSIKNFTYIETITGKYDNFSDPRLYSREAWYIRYFKGPYILRSLRFLVGDQKFRQIFHTVLEECHGSYCDYRDFIRISEKVYGDDLSWFFNEWFNTTEVPDYNVTVLKITQAGDTYNLTFTINDANDFKMPVPVRIYMENGEYVDERVWVNGTATVSLELPDKPVKIVIDPEEVIVNVNREFRLSDIWIKVD

SEQ ID NO: 1177 - protein, 225 aa, Thermococcus kodakaraensis KOD1
  misc_feature (321437)..(321437): n is a or c or g or t.
  misc_feature (527833)..(527833): n is a or c or g or t.
  misc_feature (527901)..(527901): n is a or c or g or t.
  misc_feature (527978)..(527978): n is a or c or g or t.
  misc_feature (960838)..(960839): n is a or c or g or t.
  misc_feature (960860)..(960861): n is a or c or g or t.
  misc_feature (960872)..(960873): n is a or c or g or t.
  misc_feature (960879)..(960879): n is a or c or g or t.
  misc_feature (960890)..(960890): n is a or c or g or t.
  misc_feature (1250239)..(1250239): n is a or c or g or t.
  misc_feature (1302432)..(1302434): n is a or c or g or t.
  misc_feature (1302471)..(1302471): n is a or c or g or t.
  misc_feature (1302488)..(1302488): n is a or c or g or t.
  misc_feature (1674836)..(1674836): n is a or c or g or t.
MIRLPFRDTYYELRPSKIVALAKNYAEHAKEMESDVPEKPIFFLKPPSALIGPGDPIILPRMSKRVDHEVELAVIIGKRAKRVPAEKAIDYVMGYTIMLDITARDLQAEARKKGLPWTIAKGFDTFAPVGPRVVDRRELKVEDLEIGLKVNGELRQLGRTSQMVFKVPELIEYISSVMTLEPGDIIATGTPAGVGPLRHGDHIEAWIEGIGKVEFDVLAEDSILC

SEQ ID NO: 1178 - protein, 344 aa, Thermococcus kodakaraensis KOD1
  misc_feature (321437)..(321437): n is a or c or g or t.
  misc_feature (527833)..(527833): n is a or c or g or t.
  misc_feature (527901)..(527901): n is a or c or g or t.
  misc_feature (527978)..(527978): n is a or c or g or t.
  misc_feature (960838)..(960839): n is a or c or g or t.
  misc_feature (960860)..(960861): n is a or c or g or t.
  misc_feature (960872)..(960873): n is a or c or g or t.
  misc_feature (960879)..(960879): n is a or c or g or t.
  misc_feature (960890)..(960890): n is a or c or g or t.
  misc_feature (1250239)..(1250239): n is a or c or g or t.
  misc_feature (1302432)..(1302434): n is a or c or g or t.
  misc_feature (1302471)..(1302471): n is a or c or g or t.
  misc_feature (1302488)..(1302488): n is a or c or g or t.
  misc_feature (1674836)..(1674836): n is a or c or g or t.
MKLPVRTLARLAVIYLCVLLIIILIAGATSNKLTWDYAHDALMGIRMNNPALYQELEQNATREGLTVEEYYYHILTKAAEVRDDNIFVMGMDLLRKSIDYYRRGDTKYDFNHSIKVTLMVMGLSVLLTVFLSVLLGFKLANSRFLGVAEGLARFFTGLPSWWIGAVLIAVFAVKLDAFPISGLKSIPPKGGFEGVLDVLWHLALPVATLVFVYIWEFVVVVAHNVRDELGKPYVLTARAKGISEWVIYWRHVLKNVSIVLSSFTVQKFVEMFTDYIVVDVLFNLGGLGIIFKASFVRTVVPAFGVVVRFDYRLFFVVTLAIFIISFVFSFLLELVKGMLDPRVS

SEQ ID NO: 1179 - protein, 14 aa, Thermococcus kodakaraensis KOD1
  misc_feature (321437)..(321437): n is a or c or g or t.
  misc_feature (527833)..(527833): n is a or c or g or t.
  misc_feature (527901)..(527901): n is a or c or g or t.
  misc_feature (527978)..(527978): n is a or c or g or t.
  misc_feature (960838)..(960839): n is a or c or g or t.
  misc_feature (960860)..(960861): n is a or c or g or t.
  misc_feature (960872)..(960873): n is a or c or g or t.
  misc_feature (960879)..(960879): n is a or c or g or t.
  misc_feature (960890)..(960890): n is a or c or g or t.
  misc_feature (1250239)..(1250239): n is a or c or g or t.
  misc_feature (1302432)..(1302434): n is a or c or g or t.
  misc_feature (1302471)..(1302471): n is a or c or g or t.
  misc_feature (1302488)..(1302488): n is a or c or g or t.
  misc_feature (1674836)..(1674836): n is a or c or g or t.
VVITVKFYYLIELE

SEQ ID NO: 1180 - protein, 229 aa, Thermococcus kodakaraensis KOD1
  misc_feature (321437)..(321437): n is a or c or g or t.
  misc_feature (527833)..(527833): n is a or c or g or t.
  misc_feature (527901)..(527901): n is a or c or g or t.
  misc_feature (527978)..(527978): n is a or c or g or t.
  misc_feature (960838)..(960839): n is a or c or g or t.
  misc_feature (960860)..(960861): n is a or c or g or t.
  misc_feature (960872)..(960873): n is a or c or g or t.
  misc_feature (960879)..(960879): n is a or c or g or t.
  misc_feature (960890)..(960890): n is a or c or g or t.
  misc_feature (1250239)..(1250239): n is a or c or g or t.
  misc_feature (1302432)..(1302434): n is a or c or g or t.
  misc_feature (1302471)..(1302471): n is a or c or g or t.
  misc_feature (1302488)..(1302488): n is a or c or g or t.
  misc_feature (1674836)..(1674836): n is a or c or g or t.
VMRMIEVRSLTKHYEFGNVTALKGINLTFEDGRFYIIAGASGSGKTTLLNILSGIDRPTSGEVIVDGVNIHSLKEKELRKFRLDNFGIVFQFFYLVPYLTGLENVLLPMKYSKKVENPKERAKKLLKLVNAEHLSDKLPEHMSGGEMQRIAIARALANRPKYLFADEPTANLDWENKVRVWKLLKRVNREEGITVIASTHEREFFEFADVIITLKDGEVNAIKDGGRKA

SEQ ID NO: 1181 - protein, 499 aa, Thermococcus kodakaraensis KOD1
  misc_feature (321437)..(321437): n is a or c or g or t.
  misc_feature (527833)..(527833): n is a or c or g or t.
  misc_feature (527901)..(527901): n is a or c or g or t.
  misc_feature (527978)..(527978): n is a or c or g or t.
  misc_feature (960838)..(960839): n is a or c or g or t.
  misc_feature (960860)..(960861): n is a or c or g or t.
  misc_feature (960872)..(960873): n is a or c or g or t.
  misc_feature (960879)..(960879): n is a or c or g or t.
  misc_feature (960890)..(960890): n is a or c or g or t.
  misc_feature (1250239)..(1250239): n is a or c or g or t.
  misc_feature (1302432)..(1302434): n is a or c or g or t.
  misc_feature (1302471)..(1302471): n is a or c or g or t.
  misc_feature (1302488)..(1302488): n is a or c or g or t.
  misc_feature (1674836)..(1674836): n is a or c or g or t.
MESVFQNETIKAILEKYRRIWAIGHAQSVLGWDMEVNMPKEGILERSVAQGELSVLSQEFLLKPEFVELVEKAKGIEGLNEYERGVVRVLDRSIRISKSFPPEFLREMSEVTSQATKAWEEAKRSDDFSKFEPWLDRIIDLAKRAADYLGYEDEPYDALLDLFEEGLTTKEVEKMFDKLEKELKPLLEKIMEEGKVPREHPLEKERYEREQMERVNLWILQKFGFPLGVRSRLDVSAHPFTTEFGIRDVRITTRYEGYDFRRTILSTVHEFGHALYELQQDERFMFSPIAGGVSLGIHESQSRFWENIIGRSREFAGLIYPVLKENLPFMANYTPEDVYLYFNIVRPDFIRTEADVVTYNFHILLRFKLERMMLNEGVKAKDLPELWNEEMERLLGIRPKTYAEGILQDIHWAHGTIGYFPTYSIGTLLASQIYYHMKRDIPDFEEKVARAEFEPIKAWLRERIHRWGSIYPPKELLQKALGEELNPDYFVRWVKERYL

SEQ ID NO: 1182 - protein, 361 aa, Thermococcus kodakaraensis KOD1
  misc_feature (321437)..(321437): n is a or c or g or t.
  misc_feature (527833)..(527833): n is a or c or g or t.
  misc_feature (527901)..(527901): n is a or c or g or t.
  misc_feature (527978)..(527978): n is a or c or g or t.
  misc_feature (960838)..(960839): n is a or c or g or t.
  misc_feature (960860)..(960861): n is a or c or g or t.
  misc_feature (960872)..(960873): n is a or c or g or t.
  misc_feature (960879)..(960879): n is a or c or g or t.
  misc_feature (960890)..(960890): n is a or c or g or t.
  misc_feature (1250239)..(1250239): n is a or c or g or t.
  misc_feature (1302432)..(1302434): n is a or c or g or t.
  misc_feature (1302471)..(1302471): n is a or c or g or t.
  misc_feature (1302488)..(1302488): n is a or c or g or t.
  misc_feature (1674836)..(1674836): n is a or c or g or t.
MMSLVFHGNLQYAEIPKSEIPKVIEKAYLPVIGRLLKEEIPFGLNITGYTLEILPREVIELVREGIAGGLIEIIGTSYTHAILPLLPLDRVEAQVRKDRELKEELFEVSPKGFWLPELAYDPIIPAILKDNGYGYVFADGEAMLLSDHLNSAVKPIKPLYPHLIKAQRGEGNVFLNYILGLRELKKAVEKAFPGKVTLEAVKNIDAVPVWVAINTAVMLGIGRFPLMNPKKAANWLRGKDDVLLYGTDIEFIGYRDLAGRRMSIDGLLEVVKALNVELSLPSELKHSGRKLYLRTSSWAPDKSLRIWTEDEGNARLNMLTPFVGEPLAFLAENSDARGWEPLPERRLDAFRAIYNDWRGSK

SEQ ID NO: 1183 - protein, 438 aa, Thermococcus kodakaraensis KOD1
  misc_feature (321437)..(321437): n is a or c or g or t.
  misc_feature (527833)..(527833): n is a or c or g or t.
  misc_feature (527901)..(527901): n is a or c or g or t.
  misc_feature (527978)..(527978): n is a or c or g or t.
  misc_feature (960838)..(960839): n is a or c or g or t.
  misc_feature (960860)..(960861): n is a or c or g or t.
  misc_feature (960872)..(960873): n is a or c or g or t.
  misc_feature (960879)..(960879): n is a or c or g or t.
  misc_feature (960890)..(960890): n is a or c or g or t.
  misc_feature (1250239)..(1250239): n is a or c or g or t.
  misc_feature (1302432)..(1302434): n is a or c or g or t.
  misc_feature (1302471)..(1302471): n is a or c or g or t.
  misc_feature (1302488)..(1302488): n is a or c or g or t.
  misc_feature (1674836)..(1674836): n is a or c or g or t.
VVLLFDPLKFFHHPKTIYTTRAFNCTVLSMFPEKFLFGTSTAAHQVEGDNKWNDWWYYEEMGKLPYKSGKACNHWELYREDIELMAELGYNAYRFSIEWSRLFPEEGKFNEDAFNRYREIIELLLEKGITPNVTLHHFTSPLWFMRKGGFLKEENLKYWEGYVDKAAELLKGVKLVATFNEPLVYVTMGYLTAYWPPFIKSPFKSFRVAANLLKAHAIAYELLHGKFQVGIVKHIRVMLPERKGDEKAAQKADNLFNWYFLDAIWSGKYRGAFKTYSVPESDADFIGVNYYTASTVRRSLNPLKMFFEAKDAEIGERRTQMGWSVYPEGVYLALRRASEYGRPLYVTENGIATLDDEWRKEFIIQHLRQVLRAIEDGLDVRGYFYWSLMDNYEWREGFEPRFGLIEVDFETFERRPRGSAYLYGEIARTKKLPGEEDP

SEQ ID NO: 1184 - protein, 201 aa, Thermococcus kodakaraensis KOD1
  misc_feature (321437)..(321437): n is a or c or g or t.
  misc_feature (527833)..(527833): n is a or c or g or t.
  misc_feature (527901)..(527901): n is a or c or g or t.
  misc_feature (527978)..(527978): n is a or c or g or t.
  misc_feature (960838)..(960839): n is a or c or g or t.
  misc_feature (960860)..(960861): n is a or c or g or t.
  misc_feature (960872)..(960873): n is a or c or g or t.
  misc_feature (960879)..(960879): n is a or c or g or t.
  misc_feature (960890)..(960890): n is a or c or g or t.
  misc_feature (1250239)..(1250239): n is a or c or g or t.
  misc_feature (1302432)..(1302434): n is a or c or g or t.
  misc_feature (1302471)..(1302471): n is a or c or g or t.
  misc_feature (1302488)..(1302488): n is a or c or g or t.
  misc_feature (1674836)..(1674836): n is a or c or g or t.
VVFMKRTLGVTLAALLVFLAGVKFGASYFSDVAKSTGNEFSTGEFDIGISRDDGRYYDAYKVFEFGDLLPGEEKTIRFYIKNRGDYPVSKITMTLNVTDREDGKLSKAEALVDSTPDVGELSKYLIVKDIRVLVNGTVMKLDLYAGKSLKELNGTLIRLFEGKLAESEAIGITMRVELSPDAGNECQTDTSEVAMLITASQ

SEQ ID NO: 1185 - protein, 654 aa, Thermococcus kodakaraensis KOD1
  misc_feature (321437)..(321437): n is a or c or g or t.
  misc_feature (527833)..(527833): n is a or c or g or t.
  misc_feature (527901)..(527901): n is a or c or g or t.
  misc_feature (527978)..(527978): n is a or c or g or t.
  misc_feature (960838)..(960839): n is a or c or g or t.
  misc_feature (960860)..(960861): n is a or c or g or t.
  misc_feature (960872)..(960873): n is a or c or g or t.
  misc_feature (960879)..(960879): n is a or c or g or t.
  misc_feature (960890)..(960890): n is a or c or g or t.
  misc_feature (1250239)..(1250239): n is a or c or g or t.
  misc_feature (1302432)..(1302434): n is a or c or g or t.
  misc_feature (1302471)..(1302471): n is a or c or g or t.
  misc_feature (1302488)..(1302488): n is a or c or g or t.
  misc_feature (1674836)..(1674836): n is a or c or g or t.
VMEMVNFIFGIHNHQPLGNFGWVMESAYERSYRPFMETLEEYPNMKVAVHYSGPLLEWIRDNKPEHLDLLRSLVKRGQLEIVVAGFYEPVLASIPKEDRIVQIEKLKEFARNLGYEARGVWLTERVWQPELVKSLRAAGIDYVIVDDYHFMSAGLSKDELFWPYYTEDGGEVITVFPIDEKLRYLIPFRPVDKTLEYLHSLDDGDESKVAVFHDDGEKFGVWPGTYEWVYEKGWLREFFDRVSSDERINLMLYSEYLQRFRPRGLVYLPIASYFEMSEWSLPARQAKLFVEFVEELKKENKFDRYRVFVRGGIWKNFFFKYPESNYMHKRMLMVSKAVRNNPEAREFILRAQCNDAYWHGVFGGVYLPHLRRAVWENIIKAQSHVKTGNFVRDIDFDGRDEVFIENENFYAVFKPAYGGALFELSSKRKAVNYNDVLARRWEHYHEVPEAATPEEGGEGVASIHELGKQIPDEIRRELAYDSHLRAILQDHFLEPETTLDEYRLSRYIELGDFLTGAYNFSLIENGITLERDGSVAKRPARVEKSVRLTEDGFIVDYTVRSDARALFGVELNLAVHSVMEEPAEFEAEKFEVNDPYGIGKVEIELDRRAKVWKYPIKTLSQSESGWDFIQQGVSYTVLFPVEGELRFRLRFREL

SEQ ID NO: 1186 - protein, 319 aa, Thermococcus kodakaraensis KOD1
  misc_feature (321437)..(321437): n is a or c or g or t.
  misc_feature (527833)..(527833): n is a or c or g or t.
  misc_feature (527901)..(527901): n is a or c or g or t.
  misc_feature (527978)..(527978): n is a or c or g or t.
  misc_feature (960838)..(960839): n is a or c or g or t.
  misc_feature (960860)..(960861): n is a or c or g or t.
  misc_feature (960872)..(960873): n is a or c or g or t.
  misc_feature (960879)..(960879): n is a or c or g or t.
  misc_feature (960890)..(960890): n is a or c or g or t.
  misc_feature (1250239)..(1250239): n is a or c or g or t.
  misc_feature (1302432)..(1302434): n is a or c or g or t.
  misc_feature (1302471)..(1302471): n is a or c or g or t.
  misc_feature (1302488)..(1302488): n is a or c or g or t.
  misc_feature (1674836)..(1674836): n is a or c or g or t.
MAKTVLEVKNLKMYYFTNRGVVRAVDDISFELRKGEVLGLAGESGCGKSSLGFTLMGMPTPPGKIVDGSIKIDGREIVGLPEDVLRREIRWQKISMIFQGAMNALNPVYTVGYQMIEPLIYHKGMEKEEALDVAQKYLELVGLDPEIVYRYPHELSGGMKQRVIIATALLMNPSVVIADEPTTALDVIVQAQIINLMKKLKKELGLSMIFITHDLSILAEISDRVAIMYAGKIVEIGDSEKIYYEPAHPYTQKLLAAIPRLHEDVDRLEFIPGQPPNLINPPKGCRFHPRCPYAMDVCREQEPGMKEIDKDHYAACWLL

SEQ ID NO: 1187 - protein, 257 aa, Thermococcus kodakaraensis KOD1
  misc_feature (321437)..(321437): n is a or c or g or t.
  misc_feature (527833)..(527833): n is a or c or g or t.
  misc_feature (527901)..(527901): n is a or c or g or t.
  misc_feature (527978)..(527978): n is a or c or g or t.
  misc_feature (960838)..(960839): n is a or c or g or t.
  misc_feature (960860)..(960861): n is a or c or g or t.
  misc_feature (960872)..(960873): n is a or c or g or t.
  misc_feature (960879)..(960879): n is a or c or g or t.
  misc_feature (960890)..(960890): n is a or c or g or t.
  misc_feature (1250239)..(1250239): n is a or c or g or t.
  misc_feature (1302432)..(1302434): n is a or c or g or t.
  misc_feature (1302471)..(1302471): n is a or c or g or t.
  misc_feature (1302488)..(1302488): n is a or c or g or t.
  misc_feature (1674836)..(1674836): n is a or c or g or t.
MQKMRALDYRAAIETITSFLSEKLEESGSGGFVIGISGGIDSATAAYLAAKAVGTENVLGLIMPYYENNDVEDAKLVCESLGIDYEVINIKPIVESFVSQLGFQPDKRSLGNIMSRTRMILLYAHANQLNRLVLGTSNRSEFLTGYFTKWGDGASDYAPLINLYKTEVWEIAKLLGVPGRIIQKKPTAGLWEGQTDEDELGISYRLLDEILWRLVDLKMPKEKIVEELGISVEKVEYVEGLVRRSEHKRRLPVGPEF

SEQ ID NO: 1188 - protein, 287 aa, Thermococcus kodakaraensis KOD1
  misc_feature (321437)..(321437): n is a or c or g or t.
  misc_feature (527833)..(527833): n is a or c or g or t.
  misc_feature (527901)..(527901): n is a or c or g or t.
  misc_feature (527978)..(527978): n is a or c or g or t.
  misc_feature (960838)..(960839): n is a or c or g or t.
  misc_feature (960860)..(960861): n is a or c or g or t.
  misc_feature (960872)..(960873): n is a or c or g or t.
  misc_feature (960879)..(960879): n is a or c or g or t.
  misc_feature (960890)..(960890): n is a or c or g or t.
  misc_feature (1250239)..(1250239): n is a or c or g or t.
  misc_feature (1302432)..(1302434): n is a or c or g or t.
  misc_feature (1302471)..(1302471): n is a or c or g or t.
  misc_feature (1302488)..(1302488): n is a or c or g or t.
  misc_feature (1674836)..(1674836): n is a or c or g or t.
MKKGYLFVFLAASMWGTLGIFAKYLDGFGLTPFTMVFYRVVFALLLLGAYIKLKGIGFSIERSRLRFYALYGFFSIFLFYTLYFYTVTISSVSFAVLLLYTAPMYSIILGRLIFNEKITKEKLTALVMVTLGVLFVNGSGASFSTKALVFGLLSGFTYALYGILAKFAVRKEEPEKALFYTLLFGMIFLAPFSDFSVPTGAIPYLFALALFPTFLGYVLYNHALKEVEVSRASIVATVEPVVAIFLAFLLFGEKLSLVQLLGAALIIGGSIVVHMGEKEGPEGAHQT

SEQ ID NO: 1189 - protein, 400 aa, Thermococcus kodakaraensis KOD1
  misc_feature (321437)..(321437): n is a or c or g or t.
  misc_feature (527833)..(527833): n is a or c or g or t.
  misc_feature (527901)..(527901): n is a or c or g or t.
  misc_feature (527978)..(527978): n is a or c or g or t.
  misc_feature (960838)..(960839): n is a or c or g or t.
  misc_feature (960860)..(960861): n is a or c or g or t.
  misc_feature (960872)..(960873): n is a or c or g or t.
  misc_feature (960879)..(960879): n is a or c or g or t.
  misc_feature (960890)..(960890): n is a or c or g or t.
  misc_feature (1250239)..(1250239): n is a or c or g or t.
  misc_feature (1302432)..(1302434): n is a or c or g or t.
  misc_feature (1302471)..(1302471): n is a or c or g or t.
  misc_feature (1302488)..(1302488): n is a or c or g or t.
  misc_feature (1674836)..(1674836): n is a or c or g or t.
VVVRMARVIVDAQAARAIGKGAMIVFKKGVVRTEGEINPGDIVEVYTRGGKFLGKGFANPNSNIMVRLVTKDKDTEINKELFRERIRKANEYRKNVLGYDKAYRMVYGEADYLPGLIVDRFNEIASIQISSVGMERFKLDLAEAIMEAEPEIETVFEKNTGRSRRREGLPEIERVLLGKEKYRTVIEEGRAKFIVDMRGQKTGFFLDQRENRIALEKYVKPGMRVLDVFTYTGGFAIHAAVAGADEVVAVDKSPWAINMVKENAKLNGVEDKMKYIVGSAFPVMEEMIKRGEKFDIVILDPPAFVQHEKDLKRGLRAYFNVNYAGLQLVKEGGILVTASCSQHVDLQTFKDMVIAAAAKAGKFLKMLEPYRTQAPDHPILMASKDTEYLKALFLYVEDMK

SEQ ID NO: 1190 - protein, 270 aa, Thermococcus kodakaraensis KOD1
  misc_feature (321437)..(321437): n is a or c or g or t.
  misc_feature (527833)..(527833): n is a or c or g or t.
  misc_feature (527901)..(527901): n is a or c or g or t.
  misc_feature (527978)..(527978): n is a or c or g or t.
  misc_feature (960838)..(960839): n is a or c or g or t.
  misc_feature (960860)..(960861): n is a or c or g or t.
  misc_feature (960872)..(960873): n is a or c or g or t.
  misc_feature (960879)..(960879): n is a or c or g or t.
  misc_feature (960890)..(960890): n is a or c or g or t.
  misc_feature (1250239)..(1250239): n is a or c or g or t.
  misc_feature (1302432)..(1302434): n is a or c or g or t.
  misc_feature (1302471)..(1302471): n is a or c or g or t.
  misc_feature (1302488)..(1302488): n is a or c or g or t.
  misc_feature (1674836)..(1674836): n is a or c or g or t.
VSVMVFEEFNNFDEAFSALLSKLDFKINEPFNDVKKVLCIEPHPDDCAIGLGGTIKKLTDSGIDVVYLLLTDGSMGTTDGEVSGHELALRRLEEEKRSAEILGVKKIHALDFGDTELPYTREVRKEIVTVIRKERPGIVLMPDPWLPYEGHPDHRHAGFLGIEAVSFAGLPNFNRSDLIAGLDPHSIQAVGFYYTHKPNYFVDISDVMEVKLRAVRTHESQFPEDVWELWEPYLRTIALYYGKMSGHRYAEGIRFVPGIFLHICPFAHVI

SEQ ID NO: 1191 - protein, 209 aa, Thermococcus kodakaraensis KOD1
  misc_feature (321437)..(321437): n is a or c or g or t.
  misc_feature (527833)..(527833): n is a or c or g or t.
  misc_feature (527901)..(527901): n is a or c or g or t.
  misc_feature (527978)..(527978): n is a or c or g or t.
  misc_feature (960838)..(960839): n is a or c or g or t.
  misc_feature (960860)..(960861): n is a or c or g or t.
  misc_feature (960872)..(960873): n is a or c or g or t.
  misc_feature (960879)..(960879): n is a or c or g or t.
  misc_feature (960890)..(960890): n is a or c or g or t.
  misc_feature (1250239)..(1250239): n is a or c or g or t.
  misc_feature (1302432)..(1302434): n is a or c or g or t.
  misc_feature (1302471)..(1302471): n is a or c or g or t.
  misc_feature (1302488)..(1302488): n is a or c or g or t.
  misc_feature (1674836)..(1674836): n is a or c or g or t.
VGIEVEIEKGDWTNFFVKSLQNGDFDLALHWSGTFQPSAYAVFNMLLSKDGGANYGKYENPQVDQILAEFGKTVDENKEAQYIKQLCQIWLQDVPAVPVYMATLFYEANTEYWINWPNEKNPYGVPIFWTNYGTWGTALALLGVKPANAQEVSTTTTTTSETTTSKTPTSEKTNTGSGSTTSSSNGGGICGPAVVVGLAVIPLLLRRRR

SEQ ID NO: 1192 - protein, 314 aa, Thermococcus kodakaraensis KOD1
  misc_feature (321437)..(321437): n is a or c or g or t.
  misc_feature (527833)..(527833): n is a or c or g or t.
  misc_feature (527901)..(527901): n is a or c or g or t.
  misc_feature (527978)..(527978): n is a or c or g or t.
  misc_feature (960838)..(960839): n is a or c or g or t.
  misc_feature (960860)..(960861): n is a or c or g or t.
  misc_feature (960872)..(960873): n is a or c or g or t.
  misc_feature (960879)..(960879): n is a or c or g or t.
  misc_feature (960890)..(960890): n is a or c or g or t.
  misc_feature (1250239)..(1250239): n is a or c or g or t.
  misc_feature (1302432)..(1302434): n is a or c or g or t.
  misc_feature (1302471)..(1302471): n is a or c or g or t.
  misc_feature (1302488)..(1302488): n is a or c or g or t.
  misc_feature (1674836)..(1674836): n is a or c or g or t.
MARRGRLDTVKIAFRNKKFVFGFSVLMFFIVFSLIGGLFTPFSGDGLYYERVPNTSIKVATYSTKVLPPMSNETLITYLGNRVEVTHLLGTDALGKDVYAQLVTGLRTSLWVAFLAAIIGTILGITIGFIAGYKGGWVDETLMMFTNIMLVIPSIVLLVLIAAYLSARSPEVQALIIGITGWPWVARAVRAQTLSLKEREFVSLAKLSAQGDLRIIFGEIMPNMVSYVFMAGILQFSGAILASATLDFIGLGPTTTVSLGTILQKAIAYNALQFGQWWWFIPPGLIITLIITALFFINLGMEEVFNPRLRRGGE

SEQ ID NO: 1193 - protein, 327 aa, Thermococcus kodakaraensis KOD1
  misc_feature (321437)..(321437): n is a or c or g or t.
  misc_feature (527833)..(527833): n is a or c or g or t.
  misc_feature (527901)..(527901): n is a or c or g or t.
  misc_feature (527978)..(527978): n is a or c or g or t.
  misc_feature (960838)..(960839): n is a or c or g or t.
  misc_feature (960860)..(960861): n is a or c or g or t.
  misc_feature (960872)..(960873): n is a or c or g or t.
  misc_feature (960879)..(960879): n is a or c or g or t.
  misc_feature (960890)..(960890): n is a or c or g or t.
  misc_feature (1250239)..(1250239): n is a or c or g or t.
  misc_feature (1302432)..(1302434): n is a or c or g or t.
  misc_feature (1302471)..(1302471): n is a or c or g or t.
  misc_feature (1302488)..(1302488): n is a or c or g or t.
  misc_feature (1674836)..(1674836): n is a or c or g or t.
MEVRKMSEPLVRVEHLTRVFTSGFISGFQIKAVDDVSFNIREGEIISLVGESGSGKTTIGRIILRLLPPTSGRILFKGEDIMKFNKKQLKSYYKQVQAVFQDPFASFNPVYPVDRAFDMIFDSFFPDLSHGEREELIAKALEDVGLNPDEVLGKYPHQFSGGQLQRILIARALLVEPSLLVADEAVSMLDASTRIDVLNLLGDVRDRLGTSVLFVTHDLALGYYISDTTLIMYRGRLVEFGDTERVFKNPLHPYTRMLLESVPDLNVKWEFKGEIRPEAEERSVYEIGGCNYAPRCPFATEKCWKVRPQVVEVEKNHWVACHLHGGE

SEQ ID NO: 1194 - protein, 273 aa, Thermococcus kodakaraensis KOD1
  misc_feature (321437)..(321437): n is a or c or g or t.
  misc_feature (527833)..(527833): n is a or c or g or t.
  misc_feature (527901)..(527901): n is a or c or g or t.
  misc_feature (527978)..(527978): n is a or c or g or t.
  misc_feature (960838)..(960839): n is a or c or g or t.
  misc_feature (960860)..(960861): n is a or c or g or t.
  misc_feature (960872)..(960873): n is a or c or g or t.
  misc_feature (960879)..(960879): n is a or c or g or t.
  misc_feature (960890)..(960890): n is a or c or g or t.
  misc_feature (1250239)..(1250239): n is a or c or g or t.
  misc_feature (1302432)..(1302434): n is a or c or g or t.
  misc_feature (1302471)..(1302471): n is a or c or g or t.
  misc_feature (1302488)..(1302488): n is a or c or g or t.
  misc_feature (1674836)..(1674836): n is a or c or g or t.
MATTRLGGRGVALPCSELLYSREYYPVGKPELLVSISRSGETTEAVKALESLDVPKFALTAYESTLSRKADYALIVPTHEESVVMTHSFTAFYFAFLQLLNASFGLETYDAEMTSELTREALKNEGYIREITGEFDFRNVIFLGSGILYPIALEAMLKMKEMALFWSEAYQTFEVRHGFKSVADEGTLVVLLVNEPFDWHEKLTKEFQGQGARVLTIGNGDTGADYFIDLPKVDELLTPILHLPIIQLLSYYKAIKRGLNPDQPRFLSKVVKW

SEQ ID NO: 1195 - protein, 123 aa, Thermococcus kodakaraensis KOD1
  misc_feature (321437)..(321437): n is a or c or g or t.
  misc_feature (527833)..(527833): n is a or c or g or t.
  misc_feature (527901)..(527901): n is a or c or g or t.
  misc_feature (527978)..(527978): n is a or c or g or t.
  misc_feature (960838)..(960839): n is a or c or g or t.
  misc_feature (960860)..(960861): n is a or c or g or t.
  misc_feature (960872)..(960873): n is a or c or g or t.
  misc_feature (960879)..(960879): n is a or c or g or t.
  misc_feature (960890)..(960890): n is a or c or g or t.
  misc_feature (1250239)..(1250239): n is a or c or g or t.
  misc_feature (1302432)..(1302434): n is a or c or g or t.
  misc_feature (1302471)..(1302471): n is a or c or g or t.
  misc_feature (1302488)..(1302488): n is a or c or g or t.
  misc_feature (1674836)..(1674836): n is a or c or g or t.
MDGLLDTSVVIELFGGNRKVIEGLSPGETYALPAIVLFELYCGSLKEREELMLEMIPKVEFNEEAAKIAGAIFRDLTKKGQRPPFKDLLIAATAIAHNSVLFTCDKGFERFKEYGLKVKILEK

SEQ ID NO: 1196 - protein, 353 aa, Thermococcus kodakaraensis KOD1
  misc_feature (321437)..(321437): n is a or c or g or t.
  misc_feature (527833)..(527833): n is a or c or g or t.
  misc_feature (527901)..(527901): n is a or c or g or t.
  misc_feature (527978)..(527978): n is a or c or g or t.
  misc_feature (960838)..(960839): n is a or c or g or t.
  misc_feature (960860)..(960861): n is a or c or g or t.
  misc_feature (960872)..(960873): n is a or c or g or t.
  misc_feature (960879)..(960879): n is a or c or g or t.
  misc_feature (960890)..(960890): n is a or c or g or t.
  misc_feature (1250239)..(1250239): n is a or c or g or t.
  misc_feature (1302432)..(1302434): n is a or c or g or t.
  misc_feature (1302471)..(1302471): n is a or c or g or t.
  misc_feature (1302488)..(1302488): n is a or c or g or t.
  misc_feature (1674836)..(1674836): n is a or c or g or t.
VGECHRFSSWFNLNVRVKKLFPKFNNVTSITTWVMVHMKVLVTGGAGFIGSHLVDGLMESGYEVRVLDNLSAGSLDNVKHWLDNERFEFIKGDMVDLETVKKAIEGVDVVFHLAANPEVRISAQSPETLYESNVTITYNLLEAMRNSDVEYLVFTSSSTVYGDAEVIPTPESYGPLKPISVYGGAKLAAEAIISGYAHIFGFKALSFRLANIIGKRSNHGVIYDFINKLRKNPNELEILGDGTQRKSYLHVSDTVEGMLHIFEHFKKSGETYDVYNLGNDDWITVKEIAEIVSEEMGLSPKFRFTGGVDGGRGWKGDVKLMLLDIGKAKSTGWRPKMNSYEAVRRTVKELLEG

SEQ ID NO: 1197 - protein, 163 aa, Thermococcus kodakaraensis KOD1
  misc_feature (321437)..(321437): n is a or c or g or t.
  misc_feature (527833)..(527833): n is a or c or g or t.
  misc_feature (527901)..(527901): n is a or c or g or t.
  misc_feature (527978)..(527978): n is a or c or g or t.
  misc_feature (960838)..(960839): n is a or c or g or t.
  misc_feature (960860)..(960861): n is a or c or g or t.
  misc_feature (960872)..(960873): n is a or c or g or t.
  misc_feature (960879)..(960879): n is a or c or g or t.
  misc_feature (960890)..(960890): n is a or c or g or t.
  misc_feature (1250239)..(1250239): n is a or c or g or t.
  misc_feature (1302432)..(1302434): n is a or c or g or t.
  misc_feature (1302471)..(1302471): n is a or c or g or t.
  misc_feature (1302488)..(1302488): n is a or c or g or t.
  misc_feature (1674836)..(1674836): n is a or c or g or t.
MASNKAPSRMILGNKRRMLLIEFLQRKNGSAELRDVVEYIAEREGNTDRKHRKSVYVSLMQTHLPKLEREGIVTFSRGRITLLKVPDNVTLYMEVVQKNDISWSVFYAGLSVIFALMALWLGNVLLLFAAVTYLVVSAIQHRRTYLIARPRERKNPEKSEDNV

SEQ ID NO: 1198 - protein, 179 aa, Thermococcus kodakaraensis KOD1
  misc_feature (321437)..(321437): n is a or c or g or t.
  misc_feature (527833)..(527833): n is a or c or g or t.
  misc_feature (527901)..(527901): n is a or c or g or t.
  misc_feature (527978)..(527978): n is a or c or g or t.
  misc_feature (960838)..(960839): n is a or c or g or t.
  misc_feature (960860)..(960861): n is a or c or g or t.
  misc_feature (960872)..(960873): n is a or c or g or t.
  misc_feature (960879)..(960879): n is a or c or g or t.
  misc_feature (960890)..(960890): n is a or c or g or t.
  misc_feature (1250239)..(1250239): n is a or c or g or t.
  misc_feature (1302432)..(1302434): n is a or c or g or t.
  misc_feature (1302471)..(1302471): n is a or c or g or t.
  misc_feature (1302488)..(1302488): n is a or c or g or t.
  misc_feature (1674836)..(1674836): n is a or c or g or t.
MNKLFGLALLMVGMLLAVGAGANFRYYSADRTASFDVVSDDNELIDLTALQPYVTYDAGKLYVDISEYNPNHPDWGGTGMSPNTTYVFEEMFEVSNDLWENNQTNYPICVTIKSNHDNVLLFAGDYDSPIAGPSNNLEFTVNYGDPVPVGMIFDNTNASLGMDQFQLSFEAVAGECGSP

SEQ ID NO: 1199 - protein, 315 aa, Thermococcus kodakaraensis KOD1
  misc_feature (321437)..(321437): n is a or c or g or t.
  misc_feature (527833)..(527833): n is a or c or g or t.
  misc_feature (527901)..(527901): n is a or c or g or t.
  misc_feature (527978)..(527978): n is a or c or g or t.
  misc_feature (960838)..(960839): n is a or c or g or t.
  misc_feature (960860)..(960861): n is a or c or g or t.
  misc_feature (960872)..(960873): n is a or c or g or t.
  misc_feature (960879)..(960879): n is a or c or g or t.
  misc_feature (960890)..(960890): n is a or c or g or t.
  misc_feature (1250239)..(1250239): n is a or c or g or t.
  misc_feature (1302432)..(1302434): n is a or c or g or t.
  misc_feature (1302471)..(1302471): n is a or c or g or t.
  misc_feature (1302488)..(1302488): n is a or c or g or t.
  misc_feature (1674836)..(1674836): n is a or c or g or t.
MKAIIVLVFLMGAFLIVGSSGNFREYSSSRAASVMVVSHEDEYVGFNCSDGEIASVIVLNGEGKDFDVMTLENQLITNEYVSITLEPAYCYVPAGMYLDVESGTGTPVDIAPGDSHTFGGHVAASSATPGEYYVPVTIYATWDGGGAVIESCPVKITVLDDPRITKTLLSGNTSDIPLKTYQEWTFQIEVSNPTDNDLNLTVRDTIPAEFNVSLSEVSASSGTYSFWAANQGNGNGNGNSQNGNSHPATKMKWKVLVPAGGSEHINVTIFTRVNNGNQQEFTSCGTYSLNDGATIDGYPGRSNGIEVSVACSDDD

SEQ ID NO: 1200 - protein, 69 aa, Thermococcus kodakaraensis KOD1
  misc_feature (321437)..(321437): n is a or c or g or t.
  misc_feature (527833)..(527833): n is a or c or g or t.
  misc_feature (527901)..(527901): n is a or c or g or t.
  misc_feature (527978)..(527978): n is a or c or g or t.
  misc_feature (960838)..(960839): n is a or c or g or t.
  misc_feature (960860)..(960861): n is a or c or g or t.
  misc_feature (960872)..(960873): n is a or c or g or t.
  misc_feature (960879)..(960879): n is a or c or g or t.
  misc_feature (960890)..(960890): n is a or c or g or t.
  misc_feature (1250239)..(1250239): n is a or c or g or t.
  misc_feature (1302432)..(1302434): n is a or c or g or t.
  misc_feature (1302471)..(1302471): n is a or c or g or t.
  misc_feature (1302488)..(1302488): n is a or c or g or t.
  misc_feature (1674836)..(1674836): n is a or c or g or t.
VNMAKERACRHCHYITTEDRCPVCGSRDLSDDWFDLVIVLDVESRIAKKLRESIPEAAKVPGKYAIRVR

SEQ ID NO: 1201 - protein, 110 aa, Thermococcus kodakaraensis KOD1
  misc_feature (321437)..(321437): n is a or c or g or t.
  misc_feature (527833)..(527833): n is a or c or g or t.
  misc_feature (527901)..(527901): n is a or c or g or t.
  misc_feature (527978)..(527978): n is a or c or g or t.
  misc_feature (960838)..(960839): n is a or c or g or t.
  misc_feature (960860)..(960861): n is a or c or g or t.
  misc_feature (960872)..(960873): n is a or c or g or t.
  misc_feature (960879)..(960879): n is a or c or g or t.
  misc_feature (960890)..(960890): n is a or c or g or t.
  misc_feature (1250239)..(1250239): n is a or c or g or t.
  misc_feature (1302432)..(1302434): n is a or c or g or t.
  misc_feature (1302471)..(1302471): n is a or c or g or t.
  misc_feature (1302488)..(1302488): n is a or c or g or t.
  misc_feature (1674836)..(1674836): n is a or c or g or t.
VPRYSRVWRWFVMEIKVTEIRENKLLGRKEIYFDVLHEGEPTPSREAVKGKLVAMLDLDPNTTVIQYIRSYFGSNVSKGYAKAYETRERMLYIEPEYILVRDGLVQKQEE

SEQ ID NO: 1202 - protein, 351 aa, Thermococcus kodakaraensis KOD1
  misc_feature (321437)..(321437): n is a or c or g or t.
  misc_feature (527833)..(527833): n is a or c or g or t.
  misc_feature (527901)..(527901): n is a or c or g or t.
  misc_feature (527978)..(527978): n is a or c or g or t.
  misc_feature (960838)..(960839): n is a or c or g or t.
  misc_feature (960860)..(960861): n is a or c or g or t.
  misc_feature (960872)..(960873): n is a or c or g or t.
  misc_feature (960879)..(960879): n is a or c or g or t.
  misc_feature (960890)..(960890): n is a or c or g or t.
  misc_feature (1250239)..(1250239): n is a or c or g or t.
  misc_feature (1302432)..(1302434): n is a or c or g or t.
  misc_feature (1302471)..(1302471): n is a or c or g or t.
  misc_feature (1302488)..(1302488): n is a or c or g or t.
  misc_feature (1674836)..(1674836): n is a or c or g or t.
MREIIERVKEKTTIPVYERTIENVLSAIQASGDVWRIVDLSEEPLPLVVAVVTALYELGYVAFENNQVILTRKGKELVEKYGIGPRADYTCSHCQGRTVEIDAFSELLEQFKEITRDRPEPAHQFDQAYVTPETTVARVALMHSRGDLENKEVFVLGDDDLTSVALMLSGLPKRIAVLDIDERLTKFIEKAADEIGYENIEIFTFDLRKPLPDYALHKFDTFITDPPETVEAIRAFVGRGIATLKGPGCAGYFGITRRESSLDKWREIQRVLLNEFGVVITDIIRNFNEYVNWGYVEETRAWRLLPIKVKPSYNWYKSYMFRIQTLEGSKGFEDEITVGQELYDDEESSTT

SEQ ID NO: 1203 - protein, 243 aa, Thermococcus kodakaraensis KOD1
  misc_feature (321437)..(321437): n is a or c or g or t.
  misc_feature (527833)..(527833): n is a or c or g or t.
  misc_feature (527901)..(527901): n is a or c or g or t.
  misc_feature (527978)..(527978): n is a or c or g or t.
  misc_feature (960838)..(960839): n is a or c or g or t.
  misc_feature (960860)..(960861): n is a or c or g or t.
  misc_feature (960872)..(960873): n is a or c or g or t.
  misc_feature (960879)..(960879): n is a or c or g or t.
  misc_feature (960890)..(960890): n is a or c or g or t.
  misc_feature (1250239)..(1250239): n is a or c or g or t.
  misc_feature (1302432)..(1302434): n is a or c or g or t.
  misc_feature (1302471)..(1302471): n is a or c or g or t.
  misc_feature (1302488)..(1302488): n is a or c or g or t.
  misc_feature (1674836)..(1674836): n is a or c or g or t.
MLEKEKEALAKRIAGEITLSSDPGKTMRKWREIFGISQTELADYLGVSSSVISDYEGGRRKSPGASTIRKFVEALIEIDEKRGGNVIRAFSKTIEGELPTDAILDIREFAVPVPIRAVVEAVKGEVAANHDLLDRKIYGYTVVDSIRAILEMSSEEFLKLYGWTTERALVFTKVTTGRSPMIAVRVQGLKPAVIVLHGVKRLDELAVKLAERERIPLVVSKASNENELINGLRKLVEKTEKEF

SEQ ID NO: 1204 - protein, 273 aa, Thermococcus kodakaraensis KOD1
  misc_feature (321437)..(321437): n is a or c or g or t.
  misc_feature (527833)..(527833): n is a or c or g or t.
  misc_feature (527901)..(527901): n is a or c or g or t.
  misc_feature (527978)..(527978): n is a or c or g or t.
  misc_feature (960838)..(960839): n is a or c or g or t.
  misc_feature (960860)..(960861): n is a or c or g or t.
  misc_feature (960872)..(960873): n is a or c or g or t.
  misc_feature (960879)..(960879): n is a or c or g or t.
  misc_feature (960890)..(960890): n is a or c or g or t.
  misc_feature (1250239)..(1250239): n is a or c or g or t.
  misc_feature (1302432)..(1302434): n is a or c or g or t.
  misc_feature (1302471)..(1302471): n is a or c or g or t.
  misc_feature (1302488)..(1302488): n is a or c or g or t.
  misc_feature (1674836)..(1674836): n is a or c or g or t.
MSFAKLEFFNPFSRSIKDRAVFNLVMKALKRGDINGTRRLFEATSGNVGIAMAAISNIFNVEFRAYLPKPTPDATVTLLKVLGAEVVKTDFEVIDREMIEFVRDEAEKAGAVNLNQFENDDNFEAHYRYTAREIDEQLRSIGVSPDVIVAGVGTSGHIAGIAKYFKERYDTKVIGVVPAKNEKIPGIKRLETRPKWFFDAGIDEVVEVTQREAIEGSIQVARREGILIGLSSGAVVSALEKVRDRYPGTAILILPDDAFKYVEVFEKYLRECQ

SEQ ID NO: 1205 - protein, 173 aa, Thermococcus kodakaraensis KOD1
  misc_feature (321437)..(321437): n is a or c or g or t.
  misc_feature (527833)..(527833): n is a or c or g or t.
  misc_feature (527901)..(527901): n is a or c or g or t.
  misc_feature (527978)..(527978): n is a or c or g or t.
  misc_feature (960838)..(960839): n is a or c or g or t.
  misc_feature (960860)..(960861): n is a or c or g or t.
  misc_feature (960872)..(960873): n is a or c or g or t.
  misc_feature (960879)..(960879): n is a or c or g or t.
  misc_feature (960890)..(960890): n is a or c or g or t.
  misc_feature (1250239)..(1250239): n is a or c or g or t.
  misc_feature (1302432)..(1302434): n is a or c or g or t.
  misc_feature (1302471)..(1302471): n is a or c or g or t.
  misc_feature (1302488)..(1302488): n is a or c or g or t.
  misc_feature (1674836)..(1674836): n is a or c or g or t.
MYRLLYPMRTYLVISGKDEEANVMAADWVTVLSHRPFMVGVAVSPRRYTHGLIKKYGEFVISVPTLKMLDDVWIAGTKSGPSKLKEMSITLVPSKKVSVPSIKEAAANLECRVVDARDYGDHTFFVGEVVDYTYDENVFSPRSVNLEAGLLAHVSWADFVTFEKRIYKPAERL

SEQ ID NO: 1206 - protein, 336 aa, Thermococcus kodakaraensis KOD1
  misc_feature (321437)..(321437): n is a or c or g or t.
  misc_feature (527833)..(527833): n is a or c or g or t.
  misc_feature (527901)..(527901): n is a or c or g or t.
  misc_feature (527978)..(527978): n is a or c or g or t.
  misc_feature (960838)..(960839): n is a or c or g or t.
  misc_feature (960860)..(960861): n is a or c or g or t.
  misc_feature (960872)..(960873): n is a or c or g or t.
  misc_feature (960879)..(960879): n is a or c or g or t.
  misc_feature (960890)..(960890): n is a or c or g or t.
  misc_feature (1250239)..(1250239): n is a or c or g or t.
  misc_feature (1302432)..(1302434): n is a or c or g or t.
  misc_feature (1302471)..(1302471): n is a or c or g or t.
  misc_feature (1302488)..(1302488): n is a or c or g or t.
  misc_feature (1674836)..(1674836): n is a or c or g or t.
VRLMAITFVSTPNMPEEIAELFKKQHYAIVGHHSGVKLCHWLKESLTKGRFCYKQKFYGIASHRCLQMTPVLAWCTHNCIFCWRPMEGFLGTELPQPWDDPAFIVEESIKAQRKLLVGYKGNPNVPKEKFEEAWNPKHAAISLSGEPMLYPYMGDLVEEFHKRGFTTFIVTNGTLPERLEEMKREDKLPTQLYVSLTAPDLETYNRVNVPMIPDGWERIKEFLRLMSDAQTRTVIRLTLVKGENMHNPEGYAKLIRLANPMFVEAKAYMFVGFSRNRLTINNMPRHEEIRAFAEELVKHLPGYHIEDEYEPSRVVLIMRDDVDPQGRGLNGRFIKD

SEQ ID NO: 1207 - protein, 127 aa, Thermococcus kodakaraensis KOD1
  misc_feature (321437)..(321437): n is a or c or g or t.
  misc_feature (527833)..(527833): n is a or c or g or t.
  misc_feature (527901)..(527901): n is a or c or g or t.
  misc_feature (527978)..(527978): n is a or c or g or t.
  misc_feature (960838)..(960839): n is a or c or g or t.
  misc_feature (960860)..(960861): n is a or c or g or t.
  misc_feature (960872)..(960873): n is a or c or g or t.
  misc_feature (960879)..(960879): n is a or c or g or t.
  misc_feature (960890)..(960890): n is a or c or g or t.
  misc_feature (1250239)..(1250239): n is a or c or g or t.
  misc_feature (1302432)..(1302434): n is a or c or g or t.
  misc_feature (1302471)..(1302471): n is a or c or g or t.
  misc_feature (1302488)..(1302488): n is a or c or g or t.
  misc_feature (1674836)..(1674836): n is a or c or g or t.
VLSLVSLASRQVESAELTDKTSKLKVFAIDLRDTVTKVYSSGPGFSVKKTVPMNLRAGDKITVVLNSTSGRLDVSAVIGGEHYRVYQNLPVPLVATTNVTLNSTSPDLWVYATYNQTAGAIDVRVKK

SEQ ID NO: 1208 - protein, 47 aa, Thermococcus kodakaraensis KOD1
  misc_feature (321437)..(321437): n is a or c or g or t.
  misc_feature (527833)..(527833): n is a or c or g or t.
  misc_feature (527901)..(527901): n is a or c or g or t.
  misc_feature (527978)..(527978): n is a or c or g or t.
  misc_feature (960838)..(960839): n is a or c or g or t.
  misc_feature (960860)..(960861): n is a or c or g or t.
  misc_feature (960872)..(960873): n is a or c or g or t.
  misc_feature (960879)..(960879): n is a or c or g or t.
  misc_feature (960890)..(960890): n is a or c or g or t.
  misc_feature (1250239)..(1250239): n is a or c or g or t.
  misc_feature (1302432)..(1302434): n is a or c or g or t.
  misc_feature (1302471)..(1302471): n is a or c or g or t.
  misc_feature (1302488)..(1302488): n is a or c or g or t.
  misc_feature (1674836)..(1674836): n is a or c or g or t.
MGEGITFSLWVYHNTFPQVKIEDVGNIGAVMQPIYRVAILKLWVWGE

SEQ ID NO: 1209 - protein, 107 aa, Thermococcus kodakaraensis KOD1
  misc_feature (321437)..(321437): n is a or c or g or t.
  misc_feature (527833)..(527833): n is a or c or g or t.
  misc_feature (527901)..(527901): n is a or c or g or t.
  misc_feature (527978)..(527978): n is a or c or g or t.
  misc_feature (960838)..(960839): n is a or c or g or t.
  misc_feature (960860)..(960861): n is a or c or g or t.
  misc_feature (960872)..(960873): n is a or c or g or t.
  misc_feature (960879)..(960879): n is a or c or g or t.
  misc_feature (960890)..(960890): n is a or c or g or t.
  misc_feature (1250239)..(1250239): n is a or c or g or t.
  misc_feature (1302432)..(1302434): n is a or c or g or t.
  misc_feature (1302471)..(1302471): n is a or c or g or t.
  misc_feature (1302488)..(1302488): n is a or c or g or t.
  misc_feature (1674836)..(1674836): n is a or c or g or t.
VVGMKELLSKFEKLIAEGDRMFSRGDYSGAYESYLNALYSLAAIVVYRSTGMLVPPERLPGFLGGFPELEDAIRRYSGSALGEEKVRSLREELERLRGMMSLPSSER

SEQ ID NO: 1210 - protein, 98 aa, Thermococcus kodakaraensis KOD1
  misc_feature (321437)..(321437): n is a or c or g or t.
  misc_feature (527833)..(527833): n is a or c or g or t.
  misc_feature (527901)..(527901): n is a or c or g or t.
  misc_feature (527978)..(527978): n is a or c or g or t.
  misc_feature (960838)..(960839): n is a or c or g or t.
  misc_feature (960860)..(960861): n is a or c or g or t.
  misc_feature (960872)..(960873): n is a or c or g or t.
  misc_feature (960879)..(960879): n is a or c or g or t.
  misc_feature (960890)..(960890): n is a or c or g or t.
  misc_feature (1250239)..(1250239): n is a or c or g or t.
  misc_feature (1302432)..(1302434): n is a or c or g or t.
  misc_feature (1302471)..(1302471): n is a or c or g or t.
  misc_feature (1302488)..(1302488): n is a or c or g or t.
  misc_feature (1674836)..(1674836): n is a or c or g or t.
VRSMKIKELVEILDEAIASLKIAIVANQQRAMETPYTSLEFTQRAIELQEDLDDLLKAREFLLSLDPETDAEEHFSREELERFLKLLELLRNSEAHFY

SEQ ID NO: 1211 - protein, 236 aa, Thermococcus kodakaraensis KOD1
  misc_feature (321437)..(321437): n is a or c or g or t.
  misc_feature (527833)..(527833): n is a or c or g or t.
  misc_feature (527901)..(527901): n is a or c or g or t.
  misc_feature (527978)..(527978): n is a or c or g or t.
  misc_feature (960838)..(960839): n is a or c or g or t.
  misc_feature (960860)..(960861): n is a or c or g or t.
  misc_feature (960872)..(960873): n is a or c or g or t.
  misc_feature (960879)..(960879): n is a or c or g or t.
  misc_feature (960890)..(960890): n is a or c or g or t.
  misc_feature (1250239)..(1250239): n is a or c or g or t.
  misc_feature (1302432)..(1302434): n is a or c or g or t.
  misc_feature (1302471)..(1302471): n is a or c or g or t.
  misc_feature (1302488)..(1302488): n is a or c or g or t.
  misc_feature (1674836)..(1674836): n is a or c or g or t.
MPISVDKAVIARLKTHGETFEILVDPYLARDFKEGKDVPIEEILATPYVFKDAHKGDKASEHEMEKIFGTSDPYEVAKIILRKGEVQLTAEQRRQMLEDKKRYIATVIHRHAVDPRTGYPHPVDRILRAMEEAGVHIDIFKDAEAQVPQVIKAIRPILPLKLEVKVIAVKIPGDYVGRAYGEVRKFGNIKREEWGSDGSWMFVIEIPGGVEEEFYEKLNALTKGEAITKLLERKGL

SEQ ID NO: 1212 - protein, 252 aa, Thermococcus kodakaraensis KOD1
  misc_feature (321437)..(321437): n is a or c or g or t.
  misc_feature (527833)..(527833): n is a or c or g or t.
  misc_feature (527901)..(527901): n is a or c or g or t.
  misc_feature (527978)..(527978): n is a or c or g or t.
  misc_feature (960838)..(960839): n is a or c or g or t.
  misc_feature (960860)..(960861): n is a or c or g or t.
  misc_feature (960872)..(960873): n is a or c or g or t.
  misc_feature (960879)..(960879): n is a or c or g or t.
  misc_feature (960890)..(960890): n is a or c or g or t.
  misc_feature (1250239)..(1250239): n is a or c or g or t.
  misc_feature (1302432)..(1302434): n is a or c or g or t.
  misc_feature (1302471)..(1302471): n is a or c or g or t.
  misc_feature (1302488)..(1302488): n is a or c or g or t.
  misc_feature (1674836)..(1674836): n is a or c or g or t.
VEKMMGRPEGLKLIDENGKRIDGRKKYELRPIKMEVGVLKNADGSAYVEWGKNKVLAAVYGPREIHPKHLQRPDRAILRVRYNMAPFSVEERKKPGPDRRSVEISKVIRGALEPALLLHMFPRTAIDVFIEILQADAGTRVAGITAASLALADAGIPMKDLVAACAAGKIDGEIVLDLNKEEDNYGEADVPVAIMPLKNDITLLQMDGYLTKDEFLEAVRLAIKGAKAVYQKQREALKEKYLKIAQEVEGNE

SEQ ID NO: 1213 - protein, 157 aa, Thermococcus kodakaraensis KOD1
  misc_feature (321437)..(321437): n is a or c or g or t.
  misc_feature (527833)..(527833): n is a or c or g or t.
  misc_feature (527901)..(527901): n is a or c or g or t.
  misc_feature (527978)..(527978): n is a or c or g or t.
  misc_feature (960838)..(960839): n is a or c or g or t.
  misc_feature (960860)..(960861): n is a or c or g or t.
  misc_feature (960872)..(960873): n is a or c or g or t.
  misc_feature (960879)..(960879): n is a or c or g or t.
  misc_feature (960890)..(960890): n is a or c or g or t.
  misc_feature (1250239)..(1250239): n is a or c or g or t.
  misc_feature (1302432)..(1302434): n is a or c or g or t.
  misc_feature (1302471)..(1302471): n is a or c or g or t.
  misc_feature (1302488)..(1302488): n is a or c or g or t.
  misc_feature (1674836)..(1674836): n is a or c or g or t.
VRKMGAGLDYIRSYPPEPSSLIPLLQRTQERFGYLPREVLEEIANYLGIPLSRVYGVATFYAQFRFEPLGKYVVKVCHGTACHVNGAVNIAQALKEELGIEEGQTTEDGLVTLERVACLGCCSLAPVIMINEKVFGKLTPDKVRKLVKQLKEGKLDV

SEQ ID NO: 1214 - protein, 952 aa, Thermococcus kodakaraensis KOD1
  misc_feature (321437)..(321437): n is a or c or g or t.
  misc_feature (527833)..(527833): n is a or c or g or t.
  misc_feature (527901)..(527901): n is a or c or g or t.
  misc_feature (527978)..(527978): n is a or c or g or t.
  misc_feature (960838)..(960839): n is a or c or g or t.
  misc_feature (960860)..(960861): n is a or c or g or t.
  misc_feature (960872)..(960873): n is a or c or g or t.
  misc_feature (960879)..(960879): n is a or c or g or t.
  misc_feature (960890)..(960890): n is a or c or g or t.
  misc_feature (1250239)..(1250239): n is a or c or g or t.
  misc_feature (1302432)..(1302434): n is a or c or g or t.
  misc_feature (1302471)..(1302471): n is a or c or g or t.
  misc_feature (1302488)..(1302488): n is a or c or g or t.
  misc_feature (1674836)..(1674836): n is a or c or g or t.
VMVKIILNGKETEVPDGKPLIEFLREITHVPGFCYTEELDPYGSCRLCLVSTPRGVTTSCTLKPMEGLSVETLTDEVVSMRKTALELILSDHYGDCIGPCQDGCPAHSDVQGYLALIAMGKYHEAVKLMKEKYILPAVLGRVCPAFCEEACRRNLVDEPLAIRQLKRFAADYDLEHGPWIPEIPPSTGKRIAVVGGGPAGLACAYYLRTMGHEVTIFEAMPELGGMMRYGIPPYRLPRDVLDKDIATVIETGIEVKTNTALGRDVTLDELMEKYDAVFLGVGAWKSRRMGIPGEELEGVMHGIEFLRMVNTGEEVKLGERVIVVGGGNTAMDVARTALRLGAKVTVVYRRSKAEMPANEREVEEAIEEGIEFLFLTNPVRILGDGKVEEVELIKMRLGEPDASGRRRPIPIEGSEFRVKADNVILAIGQYCDEEFLRSLGIEAKRGKAIVDDVTLQTNLPGVFAGGDLVLGPSTVIESIATGRRAAIMIDLYLKGKLEKAREVLLEPEKHIEEVLNDEDLYRVLFDLRPYNHWKKATEKDYEHVERRPRAKVELLDPEVRKQNFEEVEPPLTEEQVLEEAKRCMSCGCMEVFRCKLREYATLYNARQDAFEGEGNRFELDESHPFVTLDNNKCVLCGQCVRFTHEVAGEGVVDYMFRGFKTMISPPLGDTLGDAEGLFIGEMTDLCPVGAITEKLPFLKPGPWKTTPVKTVCNGCSFACEMNIEVYDGMLVRASRVEEGWNGHLCDVCRFMRPWAEDLAGPLLNGEPVSWEEARRFIAERDYALILTPELTNEEIAFFKEFAEKRGIPIGSTVEGGLSTATFEDIRKAKRVLLKADPEKYPLLKLLLKDKDVVEEDYEVAILEGPAEPLEAPTLILHEGVNAAGLIRAGIVGIPESKAYVVIGRAERELDGDVLVLPAGLWAAKEGTITNAFGMELEVKKVVEGYSPLELFS

SEQ ID NO: 1215 - protein, 505 aa, Thermococcus kodakaraensis KOD1
  misc_feature (321437)..(321437): n is a or c or g or t.
  misc_feature (527833)..(527833): n is a or c or g or t.
  misc_feature (527901)..(527901): n is a or c or g or t.
  misc_feature (527978)..(527978): n is a or c or g or t.
  misc_feature (960838)..(960839): n is a or c or g or t.
  misc_feature (960860)..(960861): n is a or c or g or t.
  misc_feature (960872)..(960873): n is a or c or g or t.
  misc_feature (960879)..(960879): n is a or c or g or t.
  misc_feature (960890)..(960890): n is a or c or g or t.
  misc_feature (1250239)..(1250239): n is a or c or g or t.
  misc_feature (1302432)..(1302434): n is a or c or g or t.
  misc_feature (1302471)..(1302471): n is a or c or g or t.
  misc_feature (1302488)..(1302488): n is a or c or g or t.
  misc_feature (1674836)..(1674836): n is a or c or g or t.
VVVTAPRGWDAKVLAGNSEVDGVYLKSGETAEVSVVLRPPSRPGKYPVVLQAGDSELTLWVTVVGGGVEITCLYPVKEVEAGRNVSFSLVLSSKVPVTVPLNVTLPSGWEGKFLAGGDFVRGVYLSGESTVELLVSVPSNASVGWYPIEVGAGDARTTLSVYVSKSHAGENGTVTVKVLDPESGNYIPGASVQLLRDGETVVSARTLSDGTAVIEAPEGEYTLIVTKDAYNTVRRTIRVTAGSEVEVKVSLKKLPYYFTADALSPTKSGVLGDVFVYEVVLKNLGENDDTYTFDLKAPEGWGALVTDDPSSRRGMGSVYVESGSDTRLYVVLIPPDTAEIGDYHAALKITSLGSGEEKILNFTASLSGSYGIALSPGKYSLKIEAGKSAELHVRVYNTGTSPLTNVKLNVELPEDWKTKAQITPERMSELGRDEVAEFTVKFTVPANVDSGDYVVKISAVSDQDKSEEKIRVTVTKGGGSEYIGIAVILGALVLLGILLRKYGRR

SEQ ID NO: 1216 - protein, 250 aa, Thermococcus kodakaraensis KOD1
  misc_feature (321437)..(321437): n is a or c or g or t.
  misc_feature (527833)..(527833): n is a or c or g or t.
  misc_feature (527901)..(527901): n is a or c or g or t.
  misc_feature (527978)..(527978): n is a or c or g or t.
  misc_feature (960838)..(960839): n is a or c or g or t.
  misc_feature (960860)..(960861): n is a or c or g or t.
  misc_feature (960872)..(960873): n is a or c or g or t.
  misc_feature (960879)..(960879): n is a or c or g or t.
  misc_feature (960890)..(960890): n is a or c or g or t.
  misc_feature (1250239)..(1250239): n is a or c or g or t.
  misc_feature (1302432)..(1302434): n is a or c or g or t.
  misc_feature (1302471)..(1302471): n is a or c or g or t.
  misc_feature (1302488)..(1302488): n is a or c or g or t.
  misc_feature (1674836)..(1674836): n is a or c or g or t.
MNRDELVSFLDEYLNISAYPDKSSNGLQVEGNEEVERVAFTVDTTLRTIERAAKAGADMMVVHHGMIWGGLEYVTGVHYRRLKALIENGLNLYVAHLPLDAHPEVGNNVELLRLLGLEPKGPFGEYRGLTIGFWGEFEEPQPIEKIAQIVAEKLDTTVRAYEFGKREIKTVGAISGAGAFALEEAWRKGIDLLITGEFGHADYLTAVDLPQSVLVAGHYKTETLGVKALMPVLGKKFGLDVFFIDEPTGL

SEQ ID NO: 1217 - protein, 497 aa, Thermococcus kodakaraensis KOD1
  misc_feature (321437)..(321437): n is a or c or g or t.
  misc_feature (527833)..(527833): n is a or c or g or t.
  misc_feature (527901)..(527901): n is a or c or g or t.
  misc_feature (527978)..(527978): n is a or c or g or t.
  misc_feature (960838)..(960839): n is a or c or g or t.
  misc_feature (960860)..(960861): n is a or c or g or t.
  misc_feature (960872)..(960873): n is a or c or g or t.
  misc_feature (960879)..(960879): n is a or c or g or t.
  misc_feature (960890)..(960890): n is a or c or g or t.
  misc_feature (1250239)..(1250239): n is a or c or g or t.
  misc_feature (1302432)..(1302434): n is a or c or g or t.
  misc_feature (1302471)..(1302471): n is a or c or g or t.
  misc_feature (1302488)..(1302488): n is a or c or g or t.
  misc_feature (1674836)..(1674836): n is a or c or g or t.
MAIDIGKGNMVSGNGSGKAYDVVIIGAGPAGLFAAYELAEKSDFKVLVIDEGGDVDQRKCPMYELGYCVGCQPCHIMSGVGGAGGLSDGTINLRPDIGGDLRELTNDENYAWQLVWEVDQILLRHKAPRNLFKGDPEQVKYWEQRAAQAGVKFIPIIQRHIGSDRTPEVIGDIKRYLESKGVKFLLWTKALEFNKGWVKVKRGKDVFEIRTRYIIVAPGRGGADWFHDVAQKIGLKARHGPIDVGVRVEVPAIVMEPITSINHDPKFHIYTDTYDDFVRTFCTNPNGFVVEEKYDSYVGVNGHSMHEKKSNNTNFAFLTRIELTEPVEDTTAYGKSIAQLATTIGGGKPLIQRLGDLRRGRRSTWARIRRSDVEPTLKHVTPGDIAMALPHRVVTNIIEGLEKLDRVLPGVASDHTLLYAPEIKYYAMRAEVNENLETSIENIFAAGDGAGLSRDIVNAAATGLLAARGILKKEGLYTEKDFRKPGNWKSVVESLNG

SEQ ID NO: 1218 - protein, 193 aa, Thermococcus kodakaraensis KOD1
  misc_feature (321437)..(321437): n is a or c or g or t.
  misc_feature (527833)..(527833): n is a or c or g or t.
  misc_feature (527901)..(527901): n is a or c or g or t.
  misc_feature (527978)..(527978): n is a or c or g or t.
  misc_feature (960838)..(960839): n is a or c or g or t.
  misc_feature (960860)..(960861): n is a or c or g or t.
  misc_feature (960872)..(960873): n is a or c or g or t.
  misc_feature (960879)..(960879): n is a or c or g or t.
  misc_feature (960890)..(960890): n is a or c or g or t.
  misc_feature (1250239)..(1250239): n is a or c or g or t.
  misc_feature (1302432)..(1302434): n is a or c or g or t.
  misc_feature (1302471)..(1302471): n is a or c or g or t.
  misc_feature (1302488)..(1302488): n is a or c or g or t.
  misc_feature (1674836)..(1674836): n is a or c or g or t.
MGVYIFTPEDLVRYGSARPEQLEVLREAVLEKKDILIVGTSRSGKTKLVEALLHYVPDEWKIAVITAYGEFKPFRPNIEVVDTEFDRRSTDVRTSEVIEKIRRINPDYVVIDTVHTVDVATILKTLIDDYAFIVTSLALTDDIKGEVMHWLRIDEDTFNRFDVVVELARDWRTGLRKINRIYKVKDGELIQIL

SEQ ID NO: 1219 - protein, 346 aa, Thermococcus kodakaraensis KOD1
  misc_feature (321437)..(321437): n is a or c or g or t.
  misc_feature (527833)..(527833): n is a or c or g or t.
  misc_feature (527901)..(527901): n is a or c or g or t.
  misc_feature (527978)..(527978): n is a or c or g or t.
  misc_feature (960838)..(960839): n is a or c or g or t.
  misc_feature (960860)..(960861): n is a or c or g or t.
  misc_feature (960872)..(960873): n is a or c or g or t.
  misc_feature (960879)..(960879): n is a or c or g or t.
  misc_feature (960890)..(960890): n is a or c or g or t.
  misc_feature (1250239)..(1250239): n is a or c or g or t.
  misc_feature (1302432)..(1302434): n is a or c or g or t.
  misc_feature (1302471)..(1302471): n is a or c or g or t.
  misc_feature (1302488)..(1302488): n is a or c or g or t.
  misc_feature (1674836)..(1674836): n is a or c or g or t.
MGKIHRPRRGSLAYSPRKRAKSIVPRIRSWPKDSEVRMLGFAGYKAGMTHILMIDDSPGLTKGKEIFVPVTIVEVPPLFVYGIRAYKQGYLGLETATEVWFHDLHKNVARRIKTLPKNYNEEAFQAKLGQLEDLVNDGEIADVRLLVHTQPWLIGLKKKPEVMEYAIGGDDVKAKFDYAKEKIGKELRAGEVLHEGELLDVIAVTKGKGTQGPVKRWGVKVQFHKAQRAGKGRHIGNLGPWHPARVMWTVPQAGQMGFHHRTEFNKRLIAIGENGKLVLDGNEIEITPKGGFPHYGIVRSDFLMIEGTIPGSFKRIIRVRPAIRPPKKKPPVERPQITYVSRESKQ

SEQ ID NO: 1220 - protein, 117 aa, Thermococcus kodakaraensis KOD1
  misc_feature (321437)..(321437): n is a or c or g or t.
  misc_feature (527833)..(527833): n is a or c or g or t.
  misc_feature (527901)..(527901): n is a or c or g or t.
  misc_feature (527978)..(527978): n is a or c or g or t.
  misc_feature (960838)..(960839): n is a or c or g or t.
  misc_feature (960860)..(960861): n is a or c or g or t.
  misc_feature (960872)..(960873): n is a or c or g or t.
  misc_feature (960879)..(960879): n is a or c or g or t.
  misc_feature (960890)..(960890): n is a or c or g or t.
  misc_feature (1250239)..(1250239): n is a or c or g or t.
  misc_feature (1302432)..(1302434): n is a or c or g or t.
  misc_feature (1302471)..(1302471): n is a or c or g or t.
  misc_feature (1302488)..(1302488): n is a or c or g or t.
  misc_feature (1674836)..(1674836): n is a or c or g or t.
VAEMREIGLRVQPPAEVCNDPKCPWHGNLKIHGRYVEGIVVSDKGKKTVVVERQYYHYLKKYERYELRKSKVHAHNPECINAKVGDKVLIAETRPISKTKSWVVVAVLQRAERAEEV

SEQ ID NO: 1221 - protein, 141 aa, Thermococcus kodakaraensis KOD1
  misc_feature (321437)..(321437): n is a or c or g or t.
  misc_feature (527833)..(527833): n is a or c or g or t.
  misc_feature (527901)..(527901): n is a or c or g or t.
  misc_feature (527978)..(527978): n is a or c or g or t.
  misc_feature (960838)..(960839): n is a or c or g or t.
  misc_feature (960860)..(960861): n is a or c or g or t.
  misc_feature (960872)..(960873): n is a or c or g or t.
  misc_feature (960879)..(960879): n is a or c or g or t.
  misc_feature (960890)..(960890): n is a or c or g or t.
  misc_feature (1250239)..(1250239): n is a or c or g or t.
  misc_feature (1302432)..(1302434): n is a or c or g or t.
  misc_feature (1302471)..(1302471): n is a or c or g or t.
  misc_feature (1302488)..(1302488): n is a or c or g or t.
  misc_feature (1674836)..(1674836): n is a or c or g or t.
MAKKGAGATRGISPVRPTRALPIGAYLKVADNSGAKVIQIIGVVGYKGTRRRLAAAGVGDMVVATVKKGRPDMRHQVVRAVVVRQRKEYRRLDGMRVKFEDNAAAIVTPEGVPRGTEIRGAIAREAAERWVRLGSIASIVL

SEQ ID NO: 1222 - protein, 56 aa, Thermococcus kodakaraensis KOD1
  misc_feature (321437)..(321437): n is a or c or g or t.
  misc_feature (527833)..(527833): n is a or c or g or t.
  misc_feature (527901)..(527901): n is a or c or g or t.
  misc_feature (527978)..(527978): n is a or c or g or t.
  misc_feature (960838)..(960839): n is a or c or g or t.
  misc_feature (960860)..(960861): n is a or c or g or t.
  misc_feature (960872)..(960873): n is a or c or g or t.
  misc_feature (960879)..(960879): n is a or c or g or t.
  misc_feature (960890)..(960890): n is a or c or g or t.
  misc_feature (1250239)..(1250239): n is a or c or g or t.
  misc_feature (1302432)..(1302434): n is a or c or g or t.
  misc_feature (1302471)..(1302471): n is a or c or g or t.
  misc_feature (1302488)..(1302488): n is a or c or g or t.
  misc_feature (1674836)..(1674836): n is a or c or g or t.
MAKADYNKRKPRKFGKGARRCMRCGQYGPIIRIHGLMLCRHCFREVAPKLGFKKYE

SEQ ID NO: 1223 - protein, 187 aa, Thermococcus kodakaraensis KOD1
  misc_feature (321437)..(321437): n is a or c or g or t.
  misc_feature (527833)..(527833): n is a or c or g or t.
  misc_feature (527901)..(527901): n is a or c or g or t.
  misc_feature (527978)..(527978): n is a or c or g or t.
  misc_feature (960838)..(960839): n is a or c or g or t.
  misc_feature (960860)..(960861): n is a or c or g or t.
  misc_feature (960872)..(960873): n is a or c or g or t.
  misc_feature (960879)..(960879): n is a or c or g or t.
  misc_feature (960890)..(960890): n is a or c or g or t.
  misc_feature (1250239)..(1250239): n is a or c or g or t.
  misc_feature (1302432)..(1302434): n is a or c or g or t.
  misc_feature (1302471)..(1302471): n is a or c or g or t.
  misc_feature (1302488)..(1302488): n is a or c or g or t.
  misc_feature (1674836)..(1674836): n is a or c or g or t.
VRKMPVDAWIREEIEIPEGVEVTVEGNTVKVKGPKGELQRELKYPGVQIFTEDGKVVIYKEFPRKKDVAIVRTFKAHINNMIKGVTEGFKYRLKVVYSHFPMTVKVQGDEVVIENFLGEKNPRRAKILPGVTVKVKGSEIEVEGIDKEAVGQTAANIEQATRITKWDRRVFQDGIYIVEKAGKPIKF

SEQ ID NO: 1224 - protein, 204 aa, Thermococcus kodakaraensis KOD1
  misc_feature (321437)..(321437): n is a or c or g or t.
  misc_feature (527833)..(527833): n is a or c or g or t.
  misc_feature (527901)..(527901): n is a or c or g or t.
  misc_feature (527978)..(527978): n is a or c or g or t.
  misc_feature (960838)..(960839): n is a or c or g or t.
  misc_feature (960860)..(960861): n is a or c or g or t.
  misc_feature (960872)..(960873): n is a or c or g or t.
  misc_feature (960879)..(960879): n is a or c or g or t.
  misc_feature (960890)..(960890): n is a or c or g or t.
  misc_feature (1250239)..(1250239): n is a or c or g or t.
  misc_feature (1302432)..(1302434): n is a or c or g or t.
  misc_feature (1302471)..(1302471): n is a or c or g or t.
  misc_feature (1302488)..(1302488): n is a or c or g or t.
  misc_feature (1674836)..(1674836): n is a or c or g or t.
VREMAHGPRYRVPFRRRREGKTNYHKRLKLLKSKKPRLVVRKTLNHHIAQIVVYDPKGDKTLVSAHTMELMRDFGWKGHGGNTPSAYLLGLLIGYKAKQAGIEEAILDIGLHPPTRGSSIFAVLKGAVDAGLNVPHSEEIYPEDYRINGEHIANYAKALKEEDEALYRKQFSGYLVKGLEPEKLPEHFEEVKAKIIEKFEGARE

SEQ ID NO: 1225 - protein, 148 aa, Thermococcus kodakaraensis KOD1 [sequence omitted]

SEQ ID NO: 1226 - protein, 176 aa, Thermococcus kodakaraensis KOD1
  misc_feature (321437)..(321437): n is a or c or g or t.
  misc_feature (527833)..(527833): n is a or c or g or t.
  misc_feature (527901)..(527901): n is a or c or g or t.
  misc_feature (527978)..(527978): n is a or c or g or t.
  misc_feature (960838)..(960839): n is a or c or g or t.
  misc_feature (960860)..(960861): n is a or c or g or t.
  misc_feature (960872)..(960873): n is a or c or g or t.
  misc_feature (960879)..(960879): n is a or c or g or t.
  misc_feature (960890)..(960890): n is a or c or g or t.
  misc_feature (1250239)..(1250239): n is a or c or g or t.
  misc_feature (1302432)..(1302434): n is a or c or g or t.
  misc_feature (1302471)..(1302471): n is a or c or g or t.
  misc_feature (1302488)..(1302488): n is a or c or g or t.
  misc_feature (1674836)..(1674836): n is a or c or g or t.
VSMLEGIYAFLDNLFGPFITGYHPMWVITVAGAIIGGTYTLIYYFFTDIEKQRHMQKLAKELQKEMREAQKSGDEKKLKKVQKKQMELMKMQSELMQQQMIPMFLTLPVFWIFFAWLRRWYVEVGIVKAPFNFFLFDWFHSWQHSALPPDQLGYVGWYFLTSYAVGMILRKFLNMG

SEQ ID NO: 1227 - protein, 236 aa, Thermococcus kodakaraensis KOD1
  misc_feature (321437)..(321437): n is a or c or g or t.
  misc_feature (527833)..(527833): n is a or c or g or t.
  misc_feature (527901)..(527901): n is a or c or g or t.
  misc_feature (527978)..(527978): n is a or c or g or t.
  misc_feature (960838)..(960839): n is a or c or g or t.
  misc_feature (960860)..(960861): n is a or c or g or t.
  misc_feature (960872)..(960873): n is a or c or g or t.
  misc_feature (960879)..(960879): n is a or c or g or t.
  misc_feature (960890)..(960890): n is a or c or g or t.
  misc_feature (1250239)..(1250239): n is a or c or g or t.
  misc_feature (1302432)..(1302434): n is a or c or g or t.
  misc_feature (1302471)..(1302471): n is a or c or g or t.
  misc_feature (1302488)..(1302488): n is a or c or g or t.
  misc_feature (1674836)..(1674836): n is a or c or g or t.
MKTALITGATGGIGRALSERLVRQGYHVICVARREDKLRELSKALKSFDYIAADLSDTEAPAKIRDALASMGIRKLDLLINNAGYAIRKPLLEHSSEELENIFRVNVFAPIWLTKELLPFLGKGSKVVFVISGVAFVNVPEIPSYCATKGALHYLTINLEKELAELGISTIRVYPKQVKSEFWKGKIPRGSIEPERVADAVLNGIKKNKREVFVPGYLKLVKYLPNWPVFTYRFRY

SEQ ID NO: 1228 - protein, 341 aa, Thermococcus kodakaraensis KOD1
  misc_feature (321437)..(321437): n is a or c or g or t.
  misc_feature (527833)..(527833): n is a or c or g or t.
  misc_feature (527901)..(527901): n is a or c or g or t.
  misc_feature (527978)..(527978): n is a or c or g or t.
  misc_feature (960838)..(960839): n is a or c or g or t.
  misc_feature (960860)..(960861): n is a or c or g or t.
  misc_feature (960872)..(960873): n is a or c or g or t.
  misc_feature (960879)..(960879): n is a or c or g or t.
  misc_feature (960890)..(960890): n is a or c or g or t.
  misc_feature (1250239)..(1250239): n is a or c or g or t.
  misc_feature (1302432)..(1302434): n is a or c or g or t.
  misc_feature (1302471)..(1302471): n is a or c or g or t.
  misc_feature (1302488)..(1302488): n is a or c or g or t.
  misc_feature (1674836)..(1674836): n is a or c or g or t.
VMIMARDEVRRILPADIKREVVVKDEKAETNPKWGFPPEKRPIEMHIQFGIINLDKPPGPTSHEVVAWVKRILNLNKAGHGGTLDPKVSGVLPVALERATRVVQALLPAGKEYVALMHLHGDVPEDKILAVMREFQGEIIQRPPLRSAVKRRLRTRKVYYIDVLEIEGRDVLFRVGVEAGTYIRSLIHHIGLALGVGAHMAELRRTRSGPFKEDETLVTLHDLVDYYHFWKEDGVEEYFRKAIQPMEKAVEHLPKVWIRDSAVAAVTHGADLAVPGVVKLHKGIKKGDLVAIMTLKDELVALGKAMMTTGEMLQKSKGIAVDVDKVFMPRDWYPKLWKEKE

SEQ ID NO: 1229 - protein, 341 aa, Thermococcus kodakaraensis KOD1
  misc_feature (321437)..(321437): n is a or c or g or t.
  misc_feature (527833)..(527833): n is a or c or g or t.
  misc_feature (527901)..(527901): n is a or c or g or t.
  misc_feature (527978)..(527978): n is a or c or g or t.
  misc_feature (960838)..(960839): n is a or c or g or t.
  misc_feature (960860)..(960861): n is a or c or g or t.
  misc_feature (960872)..(960873): n is a or c or g or t.
  misc_feature (960879)..(960879): n is a or c or g or t.
  misc_feature (960890)..(960890): n is a or c or g or t.
  misc_feature (1250239)..(1250239): n is a or c or g or t.
  misc_feature (1302432)..(1302434): n is a or c or g or t.
  misc_feature (1302471)..(1302471): n is a or c or g or t.
  misc_feature (1302488)..(1302488): n is a or c or g or t.
  misc_feature (1674836)..(1674836): n is a or c or g or t.
MTVIENIVGRVTVLRGGRYSVEVDVITSSGFGRFAAPVDENPDLYIAEAHRAVSEVDEIIGPELIGFDATEQELIDSYLWEIDGTEDFSHIGANTALAVSVATAKAAASEKNLPLYTYLGGTFTTELPVPILEFASDSEFDYYVMVRDLMEITDVVDAVNGVLSNLKEATVEGYSEATEKASSELGLDVALGLAQKAPMDMEKLLTLVEDNNVAYLKPMGDEELFLELIAGTHGVFIDGEYLFRQKDILDRRYYNALSIKPINLGTLTDLYNLINDAKSERIVPILAEARFESSDEALAHMAVGFRCPAVVLRKDSIAKLNELIRIAEDLGERGRVITFEG

SEQ ID NO: 1230 - protein, 152 aa, Thermococcus kodakaraensis KOD1
  misc_feature (321437)..(321437): n is a or c or g or t.
  misc_feature (527833)..(527833): n is a or c or g or t.
  misc_feature (527901)..(527901): n is a or c or g or t.
  misc_feature (527978)..(527978): n is a or c or g or t.
  misc_feature (960838)..(960839): n is a or c or g or t.
  misc_feature (960860)..(960861): n is a or c or g or t.
  misc_feature (960872)..(960873): n is a or c or g or t.
  misc_feature (960879)..(960879): n is a or c or g or t.
  misc_feature (960890)..(960890): n is a or c or g or t.
  misc_feature (1250239)..(1250239): n is a or c or g or t.
  misc_feature (1302432)..(1302434): n is a or c or g or t.
  misc_feature (1302471)..(1302471): n is a or c or g or t.
  misc_feature (1302488)..(1302488): n is a or c or g or t.
  misc_feature (1674836)..(1674836): n is a or c or g or t.
VVIVVDELDMRILSLLQKNARLSYREIAKELGVAVGTVYNRIKRLEESGVIKGYAPIVDYEKLGFGLTALIGVKAQGKKIIEIERKIAESGRAMMVYDITGEFDIFVIAKFKDRADMNRFVKWLLSLDGVEKTNTSVVMQVVKEEPRLSLED

SEQ ID NO: 1231 - protein, 36 aa, Thermococcus kodakaraensis KOD1
  misc_feature (321437)..(321437): n is a or c or g or t.
  misc_feature (527833)..(527833): n is a or c or g or t.
  misc_feature (527901)..(527901): n is a or c or g or t.
  misc_feature (527978)..(527978): n is a or c or g or t.
  misc_feature (960838)..(960839): n is a or c or g or t.
  misc_feature (960860)..(960861): n is a or c or g or t.
  misc_feature (960872)..(960873): n is a or c or g or t.
  misc_feature (960879)..(960879): n is a or c or g or t.
  misc_feature (960890)..(960890): n is a or c or g or t.
  misc_feature (1250239)..(1250239): n is a or c or g or t.
  misc_feature (1302432)..(1302434): n is a or c or g or t.
  misc_feature (1302471)..(1302471): n is a or c or g or t.
  misc_feature (1302488)..(1302488): n is a or c or g or t.
  misc_feature (1674836)..(1674836): n is a or c or g or t.
MLPWMLVYEYMFTKENERRKRRPIPEELEYVEMLRR

SEQ ID NO: 1232 - protein, 354 aa, Thermococcus kodakaraensis KOD1
  misc_feature (321437)..(321437): n is a or c or g or t.
  misc_feature (527833)..(527833): n is a or c or g or t.
  misc_feature (527901)..(527901): n is a or c or g or t.
  misc_feature (527978)..(527978): n is a or c or g or t.
  misc_feature (960838)..(960839): n is a or c or g or t.
  misc_feature (960860)..(960861): n is a or c or g or t.
  misc_feature (960872)..(960873): n is a or c or g or t.
  misc_feature (960879)..(960879): n is a or c or g or t.
  misc_feature (960890)..(960890): n is a or c or g or t.
  misc_feature (1250239)..(1250239): n is a or c or g or t.
  misc_feature (1302432)..(1302434): n is a or c or g or t.
  misc_feature (1302471)..(1302471): n is a or c or g or t.
  misc_feature (1302488)..(1302488): n is a or c or g or t.
  misc_feature (1674836)..(1674836): n is a or c or g or t.
MLRCSRCGKTYPETFMLKCDCGGTLFVEREYFDFFGSLMPYLDARRYINFLPVSGNLLPPPVPAITPTVELQVGPVTALFKLDYLQPSGSFKDRGTWVTVAKLMEEGVSEVVIDSSGNAALSFALYSLPARIRVHTFVSYDAMPAKISLLQRLGAVIHFVDGDRMEVHKEAIEFAKREGITYVTHWLNPYFIEGTKLIAYETYEQVGVPDYAFAPTGSGTLFLGLWKGFRELREMGEINEAPRLVAVQAEGYESLCERSVMKNRLADGIAIPEPPRKEDMLRALEESNGLCVSVGEAETREALEWLINAGFLVEPTSAVVLAGMWKLVDSGEIPEGSKVLLPLSGSGLKITEGI

SEQ ID NO: 1233 - protein, 158 aa, Thermococcus kodakaraensis KOD1
  misc_feature (321437)..(321437): n is a or c or g or t.
  misc_feature (527833)..(527833): n is a or c or g or t.
  misc_feature (527901)..(527901): n is a or c or g or t.
  misc_feature (527978)..(527978): n is a or c or g or t.
  misc_feature (960838)..(960839): n is a or c or g or t.
  misc_feature (960860)..(960861): n is a or c or g or t.
  misc_feature (960872)..(960873): n is a or c or g or t.
  misc_feature (960879)..(960879): n is a or c or g or t.
  misc_feature (960890)..(960890): n is a or c or g or t.
  misc_feature (1250239)..(1250239): n is a or c or g or t.
  misc_feature (1302432)..(1302434): n is a or c or g or t.
  misc_feature (1302471)..(1302471): n is a or c or g or t.
  misc_feature (1302488)..(1302488): n is a or c or g or t.
  misc_feature (1674836)..(1674836): n is a or c or g or t.
VGGLQALLLRLPRPGGDRMRVELIRSKIEEILESLKLVEEHLPEDFETFQSLGLIKDGIYKRVEFAIQNVIDICAIINSDLKLGIPEKEEDVFEGLVRGGIISKGLAQKLRLMKGFRNVLVHRYGRINDELAFEALREHLDDIYEFIETIEKFLEGQK

SEQ ID NO: 1234 - protein, 254 aa, Thermococcus kodakaraensis KOD1
  misc_feature (321437)..(321437): n is a or c or g or t.
  misc_feature (527833)..(527833): n is a or c or g or t.
  misc_feature (527901)..(527901): n is a or c or g or t.
  misc_feature (527978)..(527978): n is a or c or g or t.
  misc_feature (960838)..(960839): n is a or c or g or t.
  misc_feature (960860)..(960861): n is a or c or g or t.
  misc_feature (960872)..(960873): n is a or c or g or t.
  misc_feature (960879)..(960879): n is a or c or g or t.
  misc_feature (960890)..(960890): n is a or c or g or t.
  misc_feature (1250239)..(1250239): n is a or c or g or t.
  misc_feature (1302432)..(1302434): n is a or c or g or t.
  misc_feature (1302471)..(1302471): n is a or c or g or t.
  misc_feature (1302488)..(1302488): n is a or c or g or t.
  misc_feature (1674836)..(1674836): n is a or c or g or t.
VRGMFAEVLTIGDELLTGHTVDSNSAFIASKLTEQGYWVRRITTVGDDVEEIKAVVGEILARKPEVLVISGGLGPTHDDVTMLAVAEALGRKLVLCEKCLERIKAFYEKLYSEGYIDDPSLNEGRKKMAYLPEGAEPLENTGGAAPGAFIEHKGVKIFVLPGMPREMKAMLEKEVLPRLGRRKFLQRKFLAEITDESKLAPILREALERFNVRIHSSPKGFGKYIGLIIFAEDEGELEKTVEYLESRGIRLEEA

SEQ ID NO: 1235 - protein, 228 aa, Thermococcus kodakaraensis KOD1
  misc_feature (321437)..(321437): n is a or c or g or t.
  misc_feature (527833)..(527833): n is a or c or g or t.
  misc_feature (527901)..(527901): n is a or c or g or t.
  misc_feature (527978)..(527978): n is a or c or g or t.
  misc_feature (960838)..(960839): n is a or c or g or t.
  misc_feature (960860)..(960861): n is a or c or g or t.
  misc_feature (960872)..(960873): n is a or c or g or t.
  misc_feature (960879)..(960879): n is a or c or g or t.
  misc_feature (960890)..(960890): n is a or c or g or t.
  misc_feature (1250239)..(1250239): n is a or c or g or t.
  misc_feature (1302432)..(1302434): n is a or c or g or t.
  misc_feature (1302471)..(1302471): n is a or c or g or t.
  misc_feature (1302488)..(1302488): n is a or c or g or t.
  misc_feature (1674836)..(1674836): n is a or c or g or t.
VIPMKWIGLIGGTTPESTEYYYRKYIEISRELFEPYFFPELVVFSMNFKTFKDNPRGWEGRKEMLIEAAKALERAGAEVIGIAANTPHIVFPDVQEAVNAEMVSIIDAVAEEARRRGLKKLLLLGTKTTMEMPFYREALEKKGFQVVVPDEEERERVNSIIFNELALGKLESKPYLVELIEKYAREGVEGVILGCTELPLAIKPGDVGIEVLDSAEIHMRALIEKAME

SEQ ID NO: 1236 - protein, 216 aa, Thermococcus kodakaraensis KOD1
  misc_feature (321437)..(321437): n is a or c or g or t.
  misc_feature (527833)..(527833): n is a or c or g or t.
  misc_feature (527901)..(527901): n is a or c or g or t.
  misc_feature (527978)..(527978): n is a or c or g or t.
  misc_feature (960838)..(960839): n is a or c or g or t.
  misc_feature (960860)..(960861): n is a or c or g or t.
  misc_feature (960872)..(960873): n is a or c or g or t.
  misc_feature (960879)..(960879): n is a or c or g or t.
  misc_feature (960890)..(960890): n is a or c or g or t.
  misc_feature (1250239)..(1250239): n is a or c or g or t.
  misc_feature (1302432)..(1302434): n is a or c or g or t.
  misc_feature (1302471)..(1302471): n is a or c or g or t.
  misc_feature (1302488)..(1302488): n is a or c or g or t.
  misc_feature (1674836)..(1674836): n is a or c or g or t.
VGPKKGRRRKRMEDFEEFEYRPKSVKEIFIEMKNIVELMVDLAYSAVLFNDKEIAEEVLDLEERMDLLNYHLMTHAVLAARNPKEAEQITSVLQMANSIEDISNAAGDLAKMVLEGLELHPVITEAILESEEIIAKIQVKPDSVLVGRTLGELALASNTGVWIIAVRRGKRWIIAPDGDFKIKPGDVLIGRGTHTSVEHLKEIARGVIRVVGDERA

SEQ ID NO: 1237 - protein, 189 aa, Thermococcus kodakaraensis KOD1
  misc_feature (321437)..(321437): n is a or c or g or t.
  misc_feature (527833)..(527833): n is a or c or g or t.
  misc_feature (527901)..(527901): n is a or c or g or t.
  misc_feature (527978)..(527978): n is a or c or g or t.
  misc_feature (960838)..(960839): n is a or c or g or t.
  misc_feature (960860)..(960861): n is a or c or g or t.
  misc_feature (960872)..(960873): n is a or c or g or t.
  misc_feature (960879)..(960879): n is a or c or g or t.
  misc_feature (960890)..(960890): n is a or c or g or t.
  misc_feature (1250239)..(1250239): n is a or c or g or t.
  misc_feature (1302432)..(1302434): n is a or c or g or t.
  misc_feature (1302471)..(1302471): n is a or c or g or t.
  misc_feature (1302488)..(1302488): n is a or c or g or t.
  misc_feature (1674836)..(1674836): n is a or c or g or t.
MIFHEHSHANLTSQAILSEPHSEMVFKPPRQNPSPVRKMAQLKAHHVRLTTFIQATEDEDKVLDAIATFIPEEIDEDDVLFDILETEGYFGNPIKVVNVEIKRSKAVRKFLEYFKELLSEEDKKYLLDHLDEKVDEEGTFYVRFNKQKAYLGEAEVDEGPDVIQVRIKVKAFPMRKEAVVKAIREWLEE

SEQ ID NO: 1238 - protein, 675 aa, Thermococcus kodakaraensis KOD1
  misc_feature (321437)..(321437): n is a or c or g or t.
  misc_feature (527833)..(527833): n is a or c or g or t.
  misc_feature (527901)..(527901): n is a or c or g or t.
  misc_feature (527978)..(527978): n is a or c or g or t.
  misc_feature (960838)..(960839): n is a or c or g or t.
  misc_feature (960860)..(960861): n is a or c or g or t.
  misc_feature (960872)..(960873): n is a or c or g or t.
  misc_feature (960879)..(960879): n is a or c or g or t.
  misc_feature (960890)..(960890): n is a or c or g or t.
  misc_feature (1250239)..(1250239): n is a or c or g or t.
  misc_feature (1302432)..(1302434): n is a or c or g or t.
  misc_feature (1302471)..(1302471): n is a or c or g or t.
  misc_feature (1302488)..(1302488): n is a or c or g or t.
  misc_feature (1674836)..(1674836): n is a or c or g or t.
MKGYLTFVLHTHIPYVRKHGKWPFGEEWVFEAISETYIPLLMEFERLRDSGVKFGIVINVTPVLAEQLTDEYMKKAFEEYMERKLKAMEEDLKSGKYDEKAVSYMLNYFRKVYDYWKAINGDIIGKLRELQDQGYVEVITSAATHGYLPLLGRDEAIRAQIANGVATYEKHFGMKPKGIWLPECAYRPAGEWELPGGRKVKRQGIEKFLEEFGLRYFFVESRLIDEGPASNVYGEVLIADTEKTTLRPYWIKGSNVAVFARNRETGHQVWSAHYGYPGDFWYREFHKKAPKSGGQYWRITSKEVGLGEKEFYDPDKAMERVEEHARHFVSLVERLLREHEEKFGEKGIIVAPYDTELFGHWWFEGVKWLGRVLELLYQRGVETPTLSRFLEEYSGEKHEIELPEGSWGANSDHSTWWNEETEWTWPHIYRAEDRMVAIVSRFRGRDELTNRVIEQLARELLILEASDWQFLITTGQAKEYAKRRVLIHSRDFHRLANELVRYVKIGEFDVKLLEELEERDNPFRPVVVGPYVSENPPELEEYVEPPEVPPEKEETEEKPKVLTEKATSLALAVKKVKPVKEETREVKKKAVEASKRGKRKSSKSKRLPRKVSKKAPSKGPSDLLSIKGIGPKTFQKLKRAGVETIEDLKNANIEDLARKTGISTKRLKKFIAQVE

SEQ ID NO: 1239 - protein, 284 aa, Thermococcus kodakaraensis KOD1
  misc_feature (321437)..(321437): n is a or c or g or t.
  misc_feature (527833)..(527833): n is a or c or g or t.
  misc_feature (527901)..(527901): n is a or c or g or t.
  misc_feature (527978)..(527978): n is a or c or g or t.
  misc_feature (960838)..(960839): n is a or c or g or t.
  misc_feature (960860)..(960861): n is a or c or g or t.
  misc_feature (960872)..(960873): n is a or c or g or t.
  misc_feature (960879)..(960879): n is a or c or g or t.
  misc_feature (960890)..(960890): n is a or c or g or t.
  misc_feature (1250239)..(1250239): n is a or c or g or t.
  misc_feature (1302432)..(1302434): n is a or c or g or t.
  misc_feature (1302471)..(1302471): n is a or c or g or t.
  misc_feature (1302488)..(1302488): n is a or c or g or t.
  misc_feature (1674836)..(1674836): n is a or c or g or t.
VDRHPGPDVYTNPKIMAWMMDEYETIMRRKGPAFGVITGKPPGVGGIVARMDATARGAAFTIREAAKALGWDDLKGKTIAIQGYGNAGYYLHKIMSEEFGMKVVAVSDSKGGIYNPDGLPPADEVLKWKKEHGSVKDMPGTQNITNEELLELEVDILAPSAIEGVITKENADNVKAKIVAEVANGPVTPEADEILHEKGILQIPDFLCNAGGVTVSYFEWVQNINGFYWTVEETRKRLDDKMTKAFWDVFNTHKEKNIHMRDAAYVVAVSRVYEAMKHRGWVKK

SEQ ID NO: 1240 - protein, 122 aa, Thermococcus kodakaraensis KOD1
  misc_feature (321437)..(321437): n is a or c or g or t.
  misc_feature (527833)..(527833): n is a or c or g or t.
  misc_feature (527901)..(527901): n is a or c or g or t.
  misc_feature (527978)..(527978): n is a or c or g or t.
  misc_feature (960838)..(960839): n is a or c or g or t.
  misc_feature (960860)..(960861): n is a or c or g or t.
  misc_feature (960872)..(960873): n is a or c or g or t.
  misc_feature (960879)..(960879): n is a or c or g or t.
  misc_feature (960890)..(960890): n is a or c or g or t.
  misc_feature (1250239)..(1250239): n is a or c or g or t.
  misc_feature (1302432)..(1302434): n is a or c or g or t.
  misc_feature (1302471)..(1302471): n is a or c or g or t.
  misc_feature (1302488)..(1302488): n is a or c or g or t.
  misc_feature (1674836)..(1674836): n is a or c or g or t.
VKLTVEHKFSLTVYLWGAITGVVSGLLAYYNDAGWLLGFLLYVLVDKFVMAVVKELPEDIPEPRMILRKAFWGWFLFWLFFTMMTYTLVTDFQPVCYSNQSLLYKMVESGNASIKCVFNITG

SEQ ID NO: 1241 - protein, 373 aa, Thermococcus kodakaraensis KOD1
  misc_feature (321437)..(321437): n is a or c or g or t.
  misc_feature (527833)..(527833): n is a or c or g or t.
  misc_feature (527901)..(527901): n is a or c or g or t.
  misc_feature (527978)..(527978): n is a or c or g or t.
  misc_feature (960838)..(960839): n is a or c or g or t.
  misc_feature (960860)..(960861): n is a or c or g or t.
  misc_feature (960872)..(960873): n is a or c or g or t.
  misc_feature (960879)..(960879): n is a or c or g or t.
  misc_feature (960890)..(960890): n is a or c or g or t.
  misc_feature (1250239)..(1250239): n is a or c or g or t.
  misc_feature (1302432)..(1302434): n is a or c or g or t.
  misc_feature (1302471)..(1302471): n is a or c or g or t.
  misc_feature (1302488)..(1302488): n is a or c or g or t.
  misc_feature (1674836)..(1674836): n is a or c or g or t.
MLKLIEDAIERTSAAPQASAPEVRTQSDIDEELKKLLEQIQAKIYVVGVGGAGCNTINRMMQVGIQGAKIIAMNTDAQDLLKVRAHKKILLGKELTRGLGAGNNPKIGEEAAKESEREIREALEGADMVFITCGLGGGTGTGAAPVVAEIAKKMGALTVAVVTLPFTVEGIRRIKNAEYGLERLKKNTDTVIVIPNDKLMEVAPNLPIHMAFKVADEILVQAVKGITELITKPGLVNLDFNDVRAVMKDGGVAMIGIGESDSEKRALEAAQQALNSPLLDVDISGAKGALISISGSDVKLEEAQQIIELVTSKLDPEAQVIWGIQLDEELGKMIRILLVVTGVSSPYSVAEEEEESYFGEEERRPIKLDLDEL

SEQ ID NO: 1242 - protein, 61 aa, Thermococcus kodakaraensis KOD1
  misc_feature (321437)..(321437): n is a or c or g or t.
  misc_feature (527833)..(527833): n is a or c or g or t.
  misc_feature (527901)..(527901): n is a or c or g or t.
  misc_feature (527978)..(527978): n is a or c or g or t.
  misc_feature (960838)..(960839): n is a or c or g or t.
  misc_feature (960860)..(960861): n is a or c or g or t.
  misc_feature (960872)..(960873): n is a or c or g or t.
  misc_feature (960879)..(960879): n is a or c or g or t.
  misc_feature (960890)..(960890): n is a or c or g or t.
  misc_feature (1250239)..(1250239): n is a or c or g or t.
  misc_feature (1302432)..(1302434): n is a or c or g or t.
  misc_feature (1302471)..(1302471): n is a or c or g or t.
  misc_feature (1302488)..(1302488): n is a or c or g or t.
  misc_feature (1674836)..(1674836): n is a or c or g or t.
MAEFTEKVKSFLAESKRVLLVTKKPGMKEFKLAAKITGIGMILIGTIGMIIRIIGYLVTGS

SEQ ID NO: 1243 - protein, 343 aa, Thermococcus kodakaraensis KOD1
  misc_feature (321437)..(321437): n is a or c or g or t.
  misc_feature (527833)..(527833): n is a or c or g or t.
  misc_feature (527901)..(527901): n is a or c or g or t.
  misc_feature (527978)..(527978): n is a or c or g or t.
  misc_feature (960838)..(960839): n is a or c or g or t.
  misc_feature (960860)..(960861): n is a or c or g or t.
  misc_feature (960872)..(960873): n is a or c or g or t.
  misc_feature (960879)..(960879): n is a or c or g or t.
  misc_feature (960890)..(960890): n is a or c or g or t.
  misc_feature (1250239)..(1250239): n is a or c or g or t.
  misc_feature (1302432)..(1302434): n is a or c or g or t.
  misc_feature (1302471)..(1302471): n is a or c or g or t.
  misc_feature (1302488)..(1302488): n is a or c or g or t.
  misc_feature (1674836)..(1674836): n is a or c or g or t.
VREMAHVAEWKKKEVEELANIIKSYPVIALVDVAGVPAYPLSKMRDKLRGKALLRVSRNTLIELAIKRAAQELGQPELEKLIDHIQGGAAILATEMNPFKLYKLLEESKTPAPAKAGAVVPKDVVIPAGPTSLAPGPLVGEMQALGIPARIEKGKVSIQKDYTVLKAGEVITEQLARILNALGIEPLEVGLNLLAAYEDGIVYTPDVLAIDESEYINMLQKAYMHAFNLSVNIAYPTKQTIEAILQKAYLGAKNVAVEAGYITKDTVEDIFGRAIRAVLLIAQNLPEDLLDEKTKELLNAQAQMAVAAAPQPTEEKVEEAEEEEEEEEASEEDALAGLGALFG

SEQ ID NO: 1244 - protein, 31 aa, Thermococcus kodakaraensis KOD1
  misc_feature (321437)..(321437): n is a or c or g or t.
  misc_feature (527833)..(527833): n is a or c or g or t.
  misc_feature (527901)..(527901): n is a or c or g or t.
  misc_feature (527978)..(527978): n is a or c or g or t.
  misc_feature (960838)..(960839): n is a or c or g or t.
  misc_feature (960860)..(960861): n is a or c or g or t.
  misc_feature (960872)..(960873): n is a or c or g or t.
  misc_feature (960879)..(960879): n is a or c or g or t.
  misc_feature (960890)..(960890): n is a or c or g or t.
  misc_feature (1250239)..(1250239): n is a or c or g or t.
  misc_feature (1302432)..(1302434): n is a or c or g or t.
  misc_feature (1302471)..(1302471): n is a or c or g or t.
  misc_feature (1302488)..(1302488): n is a or c or g or t.
  misc_feature (1674836)..(1674836): n is a or c or g or t.
VALSTGQCRAKPLILGRAVFIVLTYIALSVV

SEQ ID NO: 1245 - protein, 133 aa, Thermococcus kodakaraensis KOD1
  misc_feature (321437)..(321437): n is a or c or g or t.
  misc_feature (527833)..(527833): n is a or c or g or t.
  misc_feature (527901)..(527901): n is a or c or g or t.
  misc_feature (527978)..(527978): n is a or c or g or t.
  misc_feature (960838)..(960839): n is a or c or g or t.
  misc_feature (960860)..(960861): n is a or c or g or t.
  misc_feature (960872)..(960873): n is a or c or g or t.
  misc_feature (960879)..(960879): n is a or c or g or t.
  misc_feature (960890)..(960890): n is a or c or g or t.
  misc_feature (1250239)..(1250239): n is a or c or g or t.
  misc_feature (1302432)..(1302434): n is a or c or g or t.
  misc_feature (1302471)..(1302471): n is a or c or g or t.
  misc_feature (1302488)..(1302488): n is a or c or g or t.
  misc_feature (1674836)..(1674836): n is a or c or g or t.
MYPENYKRFLELIDKLREFEGALIVEGLRDEVALRNLGVRAEIIRLSRLPLSEVALIASSHKEVMILTDFDKKGEELAKKLLNYLAGYPCSVDIETWKELRKLVRKDIKGVEDLYGLYLRVVSVSDPLLEGIQ

SEQ ID NO: 1246 - protein, 208 aa, Thermococcus kodakaraensis KOD1
  misc_feature (321437)..(321437): n is a or c or g or t.
  misc_feature (527833)..(527833): n is a or c or g or t.
  misc_feature (527901)..(527901): n is a or c or g or t.
  misc_feature (527978)..(527978): n is a or c or g or t.
  misc_feature (960838)..(960839): n is a or c or g or t.
  misc_feature (960860)..(960861): n is a or c or g or t.
  misc_feature (960872)..(960873): n is a or c or g or t.
  misc_feature (960879)..(960879): n is a or c or g or t.
  misc_feature (960890)..(960890): n is a or c or g or t.
  misc_feature (1250239)..(1250239): n is a or c or g or t.
  misc_feature (1302432)..(1302434): n is a or c or g or t.
  misc_feature (1302471)..(1302471): n is a or c or g or t.
  misc_feature (1302488)..(1302488): n is a or c or g or t.
  misc_feature (1674836)..(1674836): n is a or c or g or t.
VALMFIVLEGIDGAGKSTQAKLLAEWFENRGYEVVLTKEPTDTPFGKLIRRLVLTGGKEGIIDGAKISHEAEALLFAADRAEHVDKLIKPSLEAGKVVISDRYFYSSLAYQWARGLDLEWLIDLNRFAVKPDIVFLLDLPVKESMNRIRSRKVKSEFDKIFELQRKVRENYLKLAEMFPEMKIINAMEDVETVHNQIIALIETLLGEE

SEQ ID NO: 1247 - protein, 257 aa, Thermococcus kodakaraensis KOD1
  misc_feature (321437)..(321437): n is a or c or g or t.
  misc_feature (527833)..(527833): n is a or c or g or t.
  misc_feature (527901)..(527901): n is a or c or g or t.
  misc_feature (527978)..(527978): n is a or c or g or t.
  misc_feature (960838)..(960839): n is a or c or g or t.
  misc_feature (960860)..(960861): n is a or c or g or t.
  misc_feature (960872)..(960873): n is a or c or g or t.
  misc_feature (960879)..(960879): n is a or c or g or t.
  misc_feature (960890)..(960890): n is a or c or g or t.
  misc_feature (1250239)..(1250239): n is a or c or g or t.
  misc_feature (1302432)..(1302434): n is a or c or g or t.
  misc_feature (1302471)..(1302471): n is a or c or g or t.
  misc_feature (1302488)..(1302488): n is a or c or g or t.
  misc_feature (1674836)..(1674836): n is a or c or g or t.
VRIEREAVVMWERDRVIVLGHRGYMSNYPENTLLAFRKAVEAGADGIELDVWLTKDGRVVVMHDETIDRTSNMKGRQKDMTLEELKKADVGQGERIPTLEEVFEAIPRNALVNVELKDRDAAREVAEIVAENNPERVMISSFDIDALREYRKYDDETTMGLLIDREEVVPLIPKLKDELNLWSVNVPMEAIPLIGLEKTLQALHWVRSLGLKVVLWTENDVLFYKDDNLAKLKGLFEVVIANDVVRMIEYLKKLGLR

SEQ ID NO: 1248 - protein, 203 aa, Thermococcus kodakaraensis KOD1
  misc_feature (321437)..(321437): n is a or c or g or t.
  misc_feature (527833)..(527833): n is a or c or g or t.
  misc_feature (527901)..(527901): n is a or c or g or t.
  misc_feature (527978)..(527978): n is a or c or g or t.
  misc_feature (960838)..(960839): n is a or c or g or t.
  misc_feature (960860)..(960861): n is a or c or g or t.
  misc_feature (960872)..(960873): n is a or c or g or t.
  misc_feature (960879)..(960879): n is a or c or g or t.
  misc_feature (960890)..(960890): n is a or c or g or t.
  misc_feature (1250239)..(1250239): n is a or c or g or t.
  misc_feature (1302432)..(1302434): n is a or c or g or t.
  misc_feature (1302471)..(1302471): n is a or c or g or t.
  misc_feature (1302488)..(1302488): n is a or c or g or t.
  misc_feature (1674836)..(1674836): n is a or c or g or t.
VDMKTKVAIIGAGISGASIARVLSKYENLEVHLIEKAPDVGWGVSKANTALIHGGYDDDPEKYPMRAKLCIRGNRLWHQWVKELQIPHVWNGALIVATKEEDFDELEKLLERGRRNGVPEMRIVDRDELFHLEPGLTREAIGALWVPIVGQIGPIPAVIALVENAVANGVKTHLETEVRGIRLRTARLRASRPTTASSRRTSL

SEQ ID NO: 1249 - protein, 114 aa, Thermococcus kodakaraensis KOD1
  misc_feature (321437)..(321437): n is a or c or g or t.
  misc_feature (527833)..(527833): n is a or c or g or t.
  misc_feature (527901)..(527901): n is a or c or g or t.
  misc_feature (527978)..(527978): n is a or c or g or t.
  misc_feature (960838)..(960839): n is a or c or g or t.
  misc_feature (960860)..(960861): n is a or c or g or t.
  misc_feature (960872)..(960873): n is a or c or g or t.
  misc_feature (960879)..(960879): n is a or c or g or t.
  misc_feature (960890)..(960890): n is a or c or g or t.
  misc_feature (1250239)..(1250239): n is a or c or g or t.
  misc_feature (1302432)..(1302434): n is a or c or g or t.
  misc_feature (1302471)..(1302471): n is a or c or g or t.
  misc_feature (1302488)..(1302488): n is a or c or g or t.
  misc_feature (1674836)..(1674836): n is a or c or g or t.
MIYRFTCIVCPLGCSIEVDVENGKVKEVKGCKCPRGMEWAIQEVTSPKRVVMSVVPVEGGALPTVSVKTAEPVPKEKIPELMKFLAKLKLKAPVSVGQVVAEWEGIKIVATRGA

SEQ ID NO: 1250 - protein, 88 aa, Thermococcus kodakaraensis KOD1
  misc_feature (321437)..(321437): n is a or c or g or t.
  misc_feature (527833)..(527833): n is a or c or g or t.
  misc_feature (527901)..(527901): n is a or c or g or t.
  misc_feature (527978)..(527978): n is a or c or g or t.
  misc_feature (960838)..(960839): n is a or c or g or t.
  misc_feature (960860)..(960861): n is a or c or g or t.
  misc_feature (960872)..(960873): n is a or c or g or t.
  misc_feature (960879)..(960879): n is a or c or g or t.
  misc_feature (960890)..(960890): n is a or c or g or t.
  misc_feature (1250239)..(1250239): n is a or c or g or t.
  misc_feature (1302432)..(1302434): n is a or c or g or t.
  misc_feature (1302471)..(1302471): n is a or c or g or t.
  misc_feature (1302488)..(1302488): n is a or c or g or t.
  misc_feature (1674836)..(1674836): n is a or c or g or t.
MRREEVLELMKDLHRYLGDMGLTPCVGNNYWPADDSYVLRVHASKLYREDLERILTFAKERNLEVLIDIRHGLLEIEFYDTKHVGGDW

SEQ ID NO: 1251 - protein, 85 aa, Thermococcus kodakaraensis KOD1
  misc_feature (321437)..(321437): n is a or c or g or t.
  misc_feature (527833)..(527833): n is a or c or g or t.
  misc_feature (527901)..(527901): n is a or c or g or t.
  misc_feature (527978)..(527978): n is a or c or g or t.
  misc_feature (960838)..(960839): n is a or c or g or t.
  misc_feature (960860)..(960861): n is a or c or g or t.
  misc_feature (960872)..(960873): n is a or c or g or t.
  misc_feature (960879)..(960879): n is a or c or g or t.
  misc_feature (960890)..(960890): n is a or c or g or t.
  misc_feature (1250239)..(1250239): n is a or c or g or t.
  misc_feature (1302432)..(1302434): n is a or c or g or t.
  misc_feature (1302471)..(1302471): n is a or c or g or t.
  misc_feature (1302488)..(1302488): n is a or c or g or t.
  misc_feature (1674836)..(1674836): n is a or c or g or t.
MTADLEEKLRKLLQSQKAELEEWLREAREFVADVAIEEGKYGYNDTMYPPELFEDALKAEVLDEEIEDVKELVRMITAILEEVRP

SEQ ID NO: 1252 - protein, 69 aa, Thermococcus kodakaraensis KOD1
  misc_feature (321437)..(321437): n is a or c or g or t.
  misc_feature (527833)..(527833): n is a or c or g or t.
  misc_feature (527901)..(527901): n is a or c or g or t.
  misc_feature (527978)..(527978): n is a or c or g or t.
  misc_feature (960838)..(960839): n is a or c or g or t.
  misc_feature (960860)..(960861): n is a or c or g or t.
  misc_feature (960872)..(960873): n is a or c or g or t.
  misc_feature (960879)..(960879): n is a or c or g or t.
  misc_feature (960890)..(960890): n is a or c or g or t.
  misc_feature (1250239)..(1250239): n is a or c or g or t.
  misc_feature (1302432)..(1302434): n is a or c or g or t.
  misc_feature (1302471)..(1302471): n is a or c or g or t.
  misc_feature (1302488)..(1302488): n is a or c or g or t.
  misc_feature (1674836)..(1674836): n is a or c or g or t.
MTRAVLYFDVSQLSEFSKALQRIEELRIIVPVEVEKITTIEDDIAVILNVPEDSIELVKNALPSAVVVA

SEQ ID NO: 1253 - protein, 218 aa, Thermococcus kodakaraensis KOD1
  misc_feature (321437)..(321437): n is a or c or g or t.
  misc_feature (527833)..(527833): n is a or c or g or t.
  misc_feature (527901)..(527901): n is a or c or g or t.
  misc_feature (527978)..(527978): n is a or c or g or t.
  misc_feature (960838)..(960839): n is a or c or g or t.
  misc_feature (960860)..(960861): n is a or c or g or t.
  misc_feature (960872)..(960873): n is a or c or g or t.
  misc_feature (960879)..(960879): n is a or c or g or t.
  misc_feature (960890)..(960890): n is a or c or g or t.
  misc_feature (1250239)..(1250239): n is a or c or g or t.
  misc_feature (1302432)..(1302434): n is a or c or g or t.
  misc_feature (1302471)..(1302471): n is a or c or g or t.
  misc_feature (1302488)..(1302488): n is a or c or g or t.
  misc_feature (1674836)..(1674836): n is a or c or g or t.
VGKMVQVVTFDIGGGHKAVYTVKDGREFEEVRNRLLKKYGKADIKPPDVNDVLRKYGLSEDELKRLVSESKSQPELIMKLRKKLTGSTKYDPKFHDVEVLATKMFEAKEFKGAPFEGDIQRQLESLKKSLVVRNEKGWVVENGQLKPKLEMNTGIKTVPAPKPPEKPPIKPVSVPKPQPEPVIKATSVEPTKRGINKGLLVLGLLVGAGVLYYFTRKR

SEQ ID NO: 1254 - protein, 86 aa, Thermococcus kodakaraensis KOD1
  misc_feature (321437)..(321437): n is a or c or g or t.
  misc_feature (527833)..(527833): n is a or c or g or t.
  misc_feature (527901)..(527901): n is a or c or g or t.
  misc_feature (527978)..(527978): n is a or c or g or t.
  misc_feature (960838)..(960839): n is a or c or g or t.
  misc_feature (960860)..(960861): n is a or c or g or t.
  misc_feature (960872)..(960873): n is a or c or g or t.
  misc_feature (960879)..(960879): n is a or c or g or t.
  misc_feature (960890)..(960890): n is a or c or g or t.
  misc_feature (1250239)..(1250239): n is a or c or g or t.
  misc_feature (1302432)..(1302434): n is a or c or g or t.
  misc_feature (1302471)..(1302471): n is a or c or g or t.
  misc_feature (1302488)..(1302488): n is a or c or g or t.
  misc_feature (1674836)..(1674836): n is a or c or g or t.
VNLIDFEMTALPGAGGGAKKTEHETKRVGGYKLIVPKKPEEKEIKRIENATKTQPDTDGLLKFVRMVGILAVVIVLIGLFIGGRKK

SEQ ID NO: 1255 - protein, 65 aa, Thermococcus kodakaraensis KOD1
  misc_feature (321437)..(321437): n is a or c or g or t.
  misc_feature (527833)..(527833): n is a or c or g or t.
  misc_feature (527901)..(527901): n is a or c or g or t.
  misc_feature (527978)..(527978): n is a or c or g or t.
  misc_feature (960838)..(960839): n is a or c or g or t.
  misc_feature (960860)..(960861): n is a or c or g or t.
  misc_feature (960872)..(960873): n is a or c or g or t.
  misc_feature (960879)..(960879): n is a or c or g or t.
  misc_feature (960890)..(960890): n is a or c or g or t.
  misc_feature (1250239)..(1250239): n is a or c or g or t.
  misc_feature (1302432)..(1302434): n is a or c or g or t.
  misc_feature (1302471)..(1302471): n is a or c or g or t.
  misc_feature (1302488)..(1302488): n is a or c or g or t.
  misc_feature (1674836)..(1674836): n is a or c or g or t.
VKNRLRELREERGLTQEELAKALGVTRQTIIAIEKGKYDPSLKLAFKIARFFGLNIEDIFIYEGD

SEQ ID NO: 1256 - protein, 252 aa, Thermococcus kodakaraensis KOD1
  misc_feature (321437)..(321437): n is a or c or g or t.
  misc_feature (527833)..(527833): n is a or c or g or t.
  misc_feature (527901)..(527901): n is a or c or g or t.
  misc_feature (527978)..(527978): n is a or c or g or t.
  misc_feature (960838)..(960839): n is a or c or g or t.
  misc_feature (960860)..(960861): n is a or c or g or t.
  misc_feature (960872)..(960873): n is a or c or g or t.
  misc_feature (960879)..(960879): n is a or c or g or t.
  misc_feature (960890)..(960890): n is a or c or g or t.
  misc_feature (1250239)..(1250239): n is a or c or g or t.
  misc_feature (1302432)..(1302434): n is a or c or g or t.
  misc_feature (1302471)..(1302471): n is a or c or g or t.
  misc_feature (1302488)..(1302488): n is a or c or g or t.
  misc_feature (1674836)..(1674836): n is a or c or g or t.
MKAVLVEGLEKDYGKVKALKGISFEIKEGEIFGLIGPNGAGKSTTLKILATLLRPTGGKAEVFGHDVVEEAEEVRALISYLPEEAGAYKNLTGLEYLRFMARLYAKDEKKAEEMVKRGVQIAGLGDRLRDKVSTYSKGMTRKLLLARALMVMPKLAILDEPASGLDIVNAYTIRKTIKSFAREEGVTFLVSSHNMLEVEFLCDRVALINEGRIVESGTPAELKEKYDAENLEEVFMRAVGVEIPEPVGGEGS

SEQ ID NO: 1257 - protein, 204 aa, Thermococcus kodakaraensis KOD1
  misc_feature (321437)..(321437): n is a or c or g or t.
  misc_feature (527833)..(527833): n is a or c or g or t.
  misc_feature (527901)..(527901): n is a or c or g or t.
  misc_feature (527978)..(527978): n is a or c or g or t.
  misc_feature (960838)..(960839): n is a or c or g or t.
  misc_feature (960860)..(960861): n is a or c or g or t.
  misc_feature (960872)..(960873): n is a or c or g or t.
  misc_feature (960879)..(960879): n is a or c or g or t.
  misc_feature (960890)..(960890): n is a or c or g or t.
  misc_feature (1250239)..(1250239): n is a or c or g or t.
  misc_feature (1302432)..(1302434): n is a or c or g or t.
  misc_feature (1302471)..(1302471): n is a or c or g or t.
  misc_feature (1302488)..(1302488): n is a or c or g or t.
  misc_feature (1674836)..(1674836): n is a or c or g or t.
MSNEGALHDFIRAIVPGDIVLIKYSSNAPVEKIAWGEIIPSIHDHGIVSIDFWGIGDILMRKFAKTSGVEYTKILDVIREIKIIKIGPGAASYGEVLEDIVPTYEPQNFLRNYHSILSRISRLPRKPKYAVVFGLSHYIYFNPEKALKSILTAVGTIPAGDLAIISFVNTSILNEAHIGILEELSTKVAEVSGGKIIVAGGERI

SEQ ID NO: 1258 - protein, 294 aa, Thermococcus kodakaraensis KOD1
  misc_feature (321437)..(321437): n is a or c or g or t.
  misc_feature (527833)..(527833): n is a or c or g or t.
  misc_feature (527901)..(527901): n is a or c or g or t.
  misc_feature (527978)..(527978): n is a or c or g or t.
  misc_feature (960838)..(960839): n is a or c or g or t.
  misc_feature (960860)..(960861): n is a or c or g or t.
  misc_feature (960872)..(960873): n is a or c or g or t.
  misc_feature (960879)..(960879): n is a or c or g or t.
  misc_feature (960890)..(960890): n is a or c or g or t.
  misc_feature (1250239)..(1250239): n is a or c or g or t.
  misc_feature (1302432)..(1302434): n is a or c or g or t.
  misc_feature (1302471)..(1302471): n is a or c or g or t.
  misc_feature (1302488)..(1302488): n is a or c or g or t.
  misc_feature (1674836)..(1674836): n is a or c or g or t.
VFIMPYKILDKKELAMNEVWYKIHAPHVAKKVQPGQFVIVRAFPNGERIPLTPVTWDREEGWITLITFVRGKTTMRMANELKPGDEILNVAGPLGNPAPMEKFGRVLAIGLITGIVEVFPIARAWQEIGNEVTTLHVSPNPMVILREEFEQSVSRHIVEGFDLQPGWGMNEIAQELVKRATAKVRELLENEHFDMVLTVGPAGGQKAIFNVVKEYGIPMHADLHPIMVDATGMCGACRVTVGGEVKFACIDGPGFDAYKVDWDELIHRTGFYAPLERLALEHYLKQLQAQGGEQ

SEQ ID NO: 1259 - protein, 264 aa, Thermococcus kodakaraensis KOD1
  misc_feature (321437)..(321437): n is a or c or g or t.
  misc_feature (527833)..(527833): n is a or c or g or t.
  misc_feature (527901)..(527901): n is a or c or g or t.
  misc_feature (527978)..(527978): n is a or c or g or t.
  misc_feature (960838)..(960839): n is a or c or g or t.
  misc_feature (960860)..(960861): n is a or c or g or t.
  misc_feature (960872)..(960873): n is a or c or g or t.
  misc_feature (960879)..(960879): n is a or c or g or t.
  misc_feature (960890)..(960890): n is a or c or g or t.
  misc_feature (1250239)..(1250239): n is a or c or g or t.
  misc_feature (1302432)..(1302434): n is a or c or g or t.
  misc_feature (1302471)..(1302471): n is a or c or g or t.
  misc_feature (1302488)..(1302488): n is a or c or g or t.
  misc_feature (1674836)..(1674836): n is a or c or g or t.
MASVSAVIRNFRPLEGRAYIGLIGLAILMNAKWVSRDEALLAFIAGVFFVWYAFSINNCFDVDTDSLNPDKVKRNPIASGELSFWEGVAISVVLALLGTAIASRTNTLMFIFYLLMTLLATIYSAPPRLKARPVVDVLSHGLFFGGLPFLYGASMDGRISGIEALIALSVTLYSFALELRNHLGDYESDLKAGLKTTPIALGKKASETLVVVFSWASIVLLVVGFTPLGALGAVAVKLRINYRTLDALMLALLVAHTARLVLGG

SEQ ID NO: 1260 - protein, 397 aa, Thermococcus kodakaraensis KOD1
  misc_feature (321437)..(321437): n is a or c or g or t.
  misc_feature (527833)..(527833): n is a or c or g or t.
  misc_feature (527901)..(527901): n is a or c or g or t.
  misc_feature (527978)..(527978): n is a or c or g or t.
  misc_feature (960838)..(960839): n is a or c or g or t.
  misc_feature (960860)..(960861): n is a or c or g or t.
  misc_feature (960872)..(960873): n is a or c or g or t.
  misc_feature (960879)..(960879): n is a or c or g or t.
  misc_feature (960890)..(960890): n is a or c or g or t.
  misc_feature (1250239)..(1250239): n is a or c or g or t.
  misc_feature (1302432)..(1302434): n is a or c or g or t.
  misc_feature (1302471)..(1302471): n is a or c or g or t.
  misc_feature (1302488)..(1302488): n is a or c or g or t.
  misc_feature (1674836)..(1674836): n is a or c or g or t.
VRKMLKTGIRQVDDALDGGIIESSAVAFVGSLEYDNIILMHQVALNALKDGKKVLLVAFREAPDTLIKEAEHNGINYLPFIENGSLVILDGYTNLYAPDQKQGENILSNPLDIGITTAVIRDRLSKGDFDVLVVDDLTAQYTLQPNPKGYIKTLVRLINSVKSTGVTAMAALCGNVFEKVDLAATLIPFDYVFEVSRGRIHIARSIQPLKTANLIFPYVRSSEGIKLVLEEYATLEGIKKRLRAESDGTLWLDWDRVEIITEDSERATIETAYEFLGPEKGKEFLYLWGKKQFIGLGKDARMRTDSLRAALEEIALLTRSSGGGTLEIVDIKDDLILITGKNLFPGGKGSSLPYHVHYAGSIAQFLTEFTGKRWEGKETKCEAMGADHCEFVFWPVE

SEQ ID NO: 1261 - protein, 177 aa, Thermococcus kodakaraensis KOD1
  misc_feature (321437)..(321437): n is a or c or g or t.
  misc_feature (527833)..(527833): n is a or c or g or t.
  misc_feature (527901)..(527901): n is a or c or g or t.
  misc_feature (527978)..(527978): n is a or c or g or t.
  misc_feature (960838)..(960839): n is a or c or g or t.
  misc_feature (960860)..(960861): n is a or c or g or t.
  misc_feature (960872)..(960873): n is a or c or g or t.
  misc_feature (960879)..(960879): n is a or c or g or t.
  misc_feature (960890)..(960890): n is a or c or g or t.
  misc_feature (1250239)..(1250239): n is a or c or g or t.
  misc_feature (1302432)..(1302434): n is a or c or g or t.
  misc_feature (1302471)..(1302471): n is a or c or g or t.
  misc_feature (1302488)..(1302488): n is a or c or g or t.
  misc_feature (1674836)..(1674836): n is a or c or g or t.
VLPMADKQIERTLIILKPDAVVRGLMGEIISRFEKRGLKIVGMKMIWIDRKLAEKHYAEHKGKPFFEPLIDYITKAPSVVMVVEGRYAISVVRKMAGATDPKDAEPGSIRGDYGLDVGDAIYNVIHASDSPESAEREINLYFKPEELFEYCKAADWFYHTHARSKKEYLDSMDCLER

SEQ ID NO: 1262 - protein, 828 aa, Thermococcus kodakaraensis KOD1
  misc_feature (321437)..(321437): n is a or c or g or t.
  misc_feature (527833)..(527833): n is a or c or g or t.
  misc_feature (527901)..(527901): n is a or c or g or t.
  misc_feature (527978)..(527978): n is a or c or g or t.
  misc_feature (960838)..(960839): n is a or c or g or t.
  misc_feature (960860)..(960861): n is a or c or g or t.
  misc_feature (960872)..(960873): n is a or c or g or t.
  misc_feature (960879)..(960879): n is a or c or g or t.
  misc_feature (960890)..(960890): n is a or c or g or t.
  misc_feature (1250239)..(1250239): n is a or c or g or t.
  misc_feature (1302432)..(1302434): n is a or c or g or t.
  misc_feature (1302471)..(1302471): n is a or c or g or t.
  misc_feature (1302488)..(1302488): n is a or c or g or t.
  misc_feature (1674836)..(1674836): n is a or c or g or t.
VLAVERKRTYVSMIYLLLLIIVSFIIRLIPHRNLLLAAYDEYLHRDLTLRIAEGGIGAVSRDLPSLLGLRAYSYPPLFHIVGAFLYRIFHSDYFFLAIPAVYGTFAVLGFYFAYKELFEDEKKALLATLLLAFAPNFIYRTSLYIPENMGLLLFSLSMFFGVRFLKNKTVSSFIPFAVTFGLYTITHRGWIFFAFAAAIVLLSYLEPTIKRNVHYVIILVLAGLLAYLGLPQVKSTFGELFLRLQRSEVSFLGYFKWVGIVQLVFGVLGSSYYFKKGPLQRGLVLWAWTFLLAGGVSFRFRDPYATIPLAAIASDYFIDVVFPSIGPVLKRVLNDVRGFGSALVKTLPEKRAVQVLIIAVLILTPTFQGVYGAYHYISIPSITDKEAYEWISQNTPENATILVWWDMGYLLIGNTHRKDVVVWKKVYQGFFGEAPTVKEAARAYTDHVIMFSSNQRSLVYYLMKKYNVSYIFVDRPRYSYGLIRYGLMEYAPYDTHFKLEFCNGGSVIYKFIPEPELRIEQPLPIEYHGDYSPLVNFFERFWTGYNYADFDTGYKAYFNLNGWMVDLYYNLYNKTGDGKFKERADWLLKWLEYKQMENGAFPWGVPPNDFTLYTAYTLEPIRKFQFNGTKKALSLLKSREKEDYFMTTPKDKSGSFVVNALLLPLYKELGILNATTEKNVLREILNEQGKTGDWRDNIGTTLAIASALARYYQLTGDETVLESVKKAATWLKDQQDEEGRLKAENYPYAYSRTSYVQMAYIYHVAGFEEQAQKTLDFIMKTFDPTKETHPLDAAVSIYRYMTYAYGSEKAIEFLNSLLEQHPLPKFLP

SEQ ID NO: 1263 - protein, 793 aa, Thermococcus kodakaraensis KOD1
  misc_feature (321437)..(321437): n is a or c or g or t.
  misc_feature (527833)..(527833): n is a or c or g or t.
  misc_feature (527901)..(527901): n is a or c or g or t.
  misc_feature (527978)..(527978): n is a or c or g or t.
  misc_feature (960838)..(960839): n is a or c or g or t.
  misc_feature (960860)..(960861): n is a or c or g or t.
  misc_feature (960872)..(960873): n is a or c or g or t.
  misc_feature (960879)..(960879): n is a or c or g or t.
  misc_feature (960890)..(960890): n is a or c or g or t.
  misc_feature (1250239)..(1250239): n is a or c or g or t.
  misc_feature (1302432)..(1302434): n is a or c or g or t.
  misc_feature (1302471)..(1302471): n is a or c or g or t.
  misc_feature (1302488)..(1302488): n is a or c or g or t.
  misc_feature (1674836)..(1674836): n is a or c or g or t.
MSEYRFIKWFEELGKEDVPLVGGKGANLGELTKAGIPVPPGFCVTAEAYKYFVENVKLEDGKTLQEWIMEIISQTNVDDSKQLQENTAKIRQKIIELPMLPEIAEEIERAYKELSARFNKDAVYVAVRSSATAEDLPEASFAGQQETYLDVYGVDDVIDKVKKCWASLWTARATFYRAKQGFDHSKVYLSAVVQKMVNSEKSGVMFTANPVTNNRNEIMINASWGLGEAVVSGSVTPDEYIVEKGTWKIKEKFIAKKEVMVVRNPETGKGTVYVKVADYLGPEWVEKQVLTDEQIIEVAKMGAKIEEHYGWPQDIEWAYDKDDGKLYIVQSRPITTLKEETKAEEVEGTEEAEVILKGLGASPGIGAGRVVVIFDASEIDKVKEGDVLVTTMTNPDMVPAMKRASAIVTDEGGRTSHAAIVSRELGIPAVVGTKEATKKLKTGDYVTVDGTRGVVYKGIVKSLVEKKEEKAAGAAGGQVVVAGAPLITATKVKVNVSMPEVAERAAATGADGVGLLRAEHMILSIGQHPIKFIKEGKFDELVEKLADGIRTVAAAFYPRPVWYRTLDAPTNEFKEMPGGEDEPDERNPMLGWRGIRRGLDQPELLKAEFTAIKKVVEEGYNNIGVMLPLVGHPEQIRKAKEIARSVGLEPHKDVEWGIMIEVPAAALIIEDLIKEGIDFVSFGTNDLTQYTLAIDRDNDRIAHLYDETHPAVLKLIKHVIKVAKKHGVETSICGQAGSDPKMAKILVRLGIDSISANPDAVELIRKTVAQEEQKILLEAARKRLFEEEDELEF

SEQ ID NO: 1264 - protein, 75 aa, Thermococcus kodakaraensis KOD1
  misc_feature (321437)..(321437): n is a or c or g or t.
  misc_feature (527833)..(527833): n is a or c or g or t.
  misc_feature (527901)..(527901): n is a or c or g or t.
  misc_feature (527978)..(527978): n is a or c or g or t.
  misc_feature (960838)..(960839): n is a or c or g or t.
  misc_feature (960860)..(960861): n is a or c or g or t.
  misc_feature (960872)..(960873): n is a or c or g or t.
  misc_feature (960879)..(960879): n is a or c or g or t.
  misc_feature (960890)..(960890): n is a or c or g or t.
  misc_feature (1250239)..(1250239): n is a or c or g or t.
  misc_feature (1302432)..(1302434): n is a or c or g or t.
  misc_feature (1302471)..(1302471): n is a or c or g or t.
  misc_feature (1302488)..(1302488): n is a or c or g or t.
  misc_feature (1674836)..(1674836): n is a or c or g or t.
MGAVEVKRVDPQGRLVLPKSWRERWGNEVIVVELEDRIEILPRKKPRLSRFFDILEVELKGEDIEKELLKDINPQ

SEQ ID NO: 1265 - protein, 138 aa, Thermococcus kodakaraensis KOD1
  misc_feature (321437)..(321437): n is a or c or g or t.
  misc_feature (527833)..(527833): n is a or c or g or t.
  misc_feature (527901)..(527901): n is a or c or g or t.
  misc_feature (527978)..(527978): n is a or c or g or t.
  misc_feature (960838)..(960839): n is a or c or g or t.
  misc_feature (960860)..(960861): n is a or c or g or t.
  misc_feature (960872)..(960873): n is a or c or g or t.
  misc_feature (960879)..(960879): n is a or c or g or t.
  misc_feature (960890)..(960890): n is a or c or g or t.
  misc_feature (1250239)..(1250239): n is a or c or g or t.
  misc_feature (1302432)..(1302434): n is a or c or g or t.
  misc_feature (1302471)..(1302471): n is a or c or g or t.
  misc_feature (1302488)..(1302488): n is a or c or g or t.
  misc_feature (1674836)..(1674836): n is a or c or g or t.
MRFIDANVFLYAVIKPKGEVPSSVLERKKKAREILTRIENGEEVATTVVHLSEVANILEAKLNLTIALEFIEDLLTAENVIVLPVATEDYLKAILIARDKGVSVNDALAYLKMRELDINEIYTFDRHFLNLDVKIVEE

SEQ ID NO: 1266 - protein, 145 aa, Thermococcus kodakaraensis KOD1
  misc_feature (145)..(145): The 'Xaa' at location 145 stands for Lys, Arg, Thr, Ile, Glu, Gly , Ala, Val, Gln, Pro, Leu, a stop codon, or Ser.
  misc_feature (321437)..(321437): n is a or c or g or t.
  misc_feature (527833)..(527833): n is a or c or g or t.
  misc_feature (527901)..(527901): n is a or c or g or t.
  misc_feature (527978)..(527978): n is a or c or g or t.
  misc_feature (960838)..(960839): n is a or c or g or t.
  misc_feature (960860)..(960861): n is a or c or g or t.
  misc_feature (960872)..(960873): n is a or c or g or t.
  misc_feature (960879)..(960879): n is a or c or g or t.
  misc_feature (960890)..(960890): n is a or c or g or t.
  misc_feature (1250239)..(1250239): n is a or c or g or t.
  misc_feature (1302432)..(1302434): n is a or c or g or t.
  misc_feature (1302471)..(1302471): n is a or c or g or t.
  misc_feature (1302488)..(1302488): n is a or c or g or t.
  misc_feature (1674836)..(1674836): n is a or c or g or t.
VKSMKRDERWEGVYSFEDSPFIMEILTELRDESTGPIAFRKGLVKLGRYMAYEITKTMATEKVPIRTPLEETEGIIVKDRRNVVIITVLRAAIPLMEGLIKVFEHARVGIVSASRGKAPKFEIEMKYVKVPRIKAEDTVIIADPX

SEQ ID NO: 1267 - protein, 77 aa, Thermococcus kodakaraensis KOD1
  misc_feature (3)..(3): The 'Xaa' at location 3 stands for Tyr, Cys, Ser, or Phe.
  misc_feature (321437)..(321437): n is a or c or g or t.
  misc_feature (527833)..(527833): n is a or c or g or t.
  misc_feature (527901)..(527901): n is a or c or g or t.
  misc_feature (527978)..(527978): n is a or c or g or t.
  misc_feature (960838)..(960839): n is a or c or g or t.
  misc_feature (960860)..(960861): n is a or c or g or t.
  misc_feature (960872)..(960873): n is a or c or g or t.
  misc_feature (960879)..(960879): n is a or c or g or t.
  misc_feature (960890)..(960890): n is a or c or g or t.
  misc_feature (1250239)..(1250239): n is a or c or g or t.
  misc_feature (1302432)..(1302434): n is a or c or g or t.
  misc_feature (1302471)..(1302471): n is a or c or g or t.
  misc_feature (1302488)..(1302488): n is a or c or g or t.
  misc_feature (1674836)..(1674836): n is a or c or g or t.
MRXKKYGNAKRYVVVGVLAAPEGITRIKEAHPDVEMFVAAIDRELNDHGYILPGLGDAGDRAFGEPIRFEDGAPGGI

SEQ ID NO: 1268 - protein, 181 aa, Thermococcus kodakaraensis KOD1
  misc_feature (321437)..(321437): n is a or c or g or t.
  misc_feature (527833)..(527833): n is a or c or g or t.
  misc_feature (527901)..(527901): n is a or c or g or t.
  misc_feature (527978)..(527978): n is a or c or g or t.
  misc_feature (960838)..(960839): n is a or c or g or t.
  misc_feature (960860)..(960861): n is a or c or g or t.
  misc_feature (960872)..(960873): n is a or c or g or t.
  misc_feature (960879)..(960879): n is a or c or g or t.
  misc_feature (960890)..(960890): n is a or c or g or t.
  misc_feature (1250239)..(1250239): n is a or c or g or t.
  misc_feature (1302432)..(1302434): n is a or c or g or t.
  misc_feature (1302471)..(1302471): n is a or c or g or t.
  misc_feature (1302488)..(1302488): n is a or c or g or t.
  misc_feature (1674836)..(1674836): n is a or c or g or t.
MSSFNLYLNVMGVIEMKVLILSADGFEDLELIYPLHRIKEEGHEVYVASFQRGKITGKHGYTVNVDLAFDEVDPDEFDALVLPGGRAPEIVRLNEKAVAITKKMFEDGKPVASICHGPQILISAGVLKGRKGTSTVTIRDDVKNAGAEWIDAEVVVDGNWVSSRHPGDLYAWMREFVKLLR

SEQ ID NO: 1269 - protein, 409 aa, Thermococcus kodakaraensis KOD1
  misc_feature (321437)..(321437): n is a or c or g or t.
  misc_feature (527833)..(527833): n is a or c or g or t.
  misc_feature (527901)..(527901): n is a or c or g or t.
  misc_feature (527978)..(527978): n is a or c or g or t.
  misc_feature (960838)..(960839): n is a or c or g or t.
  misc_feature (960860)..(960861): n is a or c or g or t.
  misc_feature (960872)..(960873): n is a or c or g or t.
  misc_feature (960879)..(960879): n is a or c or g or t.
  misc_feature (960890)..(960890): n is a or c or g or t.
  misc_feature (1250239)..(1250239): n is a or c or g or t.
  misc_feature (1302432)..(1302434): n is a or c or g or t.
  misc_feature (1302471)..(1302471): n is a or c or g or t.
  misc_feature (1302488)..(1302488): n is a or c or g or t.
  misc_feature (1674836)..(1674836): n is a or c or g or t.
MEPLTSVVEMAFLKVVPLEEAVKVIESFNLEPKVEKVSLEQALGRVLAEDVVSPIDVPPFDRATVDGYAVRAQDTFMASESEPVKLKVVGEINAGDTPSIQLKEGEAVYISTGAPLPEGADAVIQFEDVDRDGDTVIIYKPAYPGLGVMKAGADIPKGKLLLKKGTRLGFKETALLSAVGISEVPVFKKPKVAVISTGNEIIPPGEELKPGKIYDINGRAITDAVRELGGEALFLGIARDDRESLKSLILEGLECCDVVLLSGGASGGIRDLTSSIIEELGRVYIHGIAIQPGKPTIIGEINGKPIFGLPGYPTSCLTNFTLLVAPLLRKLIGRSSEVRKVKKRLAHKVFSVKGRRQFLPVRIEGEKAVPILKGSGAVTSFVDADGFIEVPETVEILEAGEEVEVTLFG

SEQ ID NO: 1270 - protein, 550 aa, Thermococcus kodakaraensis KOD1
  misc_feature (321437)..(321437): n is a or c or g or t.
  misc_feature (527833)..(527833): n is a or c or g or t.
  misc_feature (527901)..(527901): n is a or c or g or t.
  misc_feature (527978)..(527978): n is a or c or g or t.
  misc_feature (960838)..(960839): n is a or c or g or t.
  misc_feature (960860)..(960861): n is a or c or g or t.
  misc_feature (960872)..(960873): n is a or c or g or t.
  misc_feature (960879)..(960879): n is a or c or g or t.
  misc_feature (960890)..(960890): n is a or c or g or t.
  misc_feature (1250239)..(1250239): n is a or c or g or t.
  misc_feature (1302432)..(1302434): n is a or c or g or t.
  misc_feature (1302471)..(1302471): n is a or c or g or t.
  misc_feature (1302488)..(1302488): n is a or c or g or t.
  misc_feature (1674836)..(1674836): n is a or c or g or t.
VVIKMNHYRKLLALISVLIVLSSPCVSAYSTAWCESCHQLLVENDGLFAYNGSEFQDLTWKLEAEELPYEDGDFLSIVDTLEVANAGNLTLIYSYPYDELYMGVYNGSVPITLRPVLPNYVGYARDFLFYNGSIFLVVNYGSVPHSASDSVFRLDPKTLNVTGEWGLSWEARDTIAPENAGITPYAWVNLGLDNKNRLWARVDMIFPNTTVYYLYHNGDFELKNETPEGFHIPEVKAPFDIAVEDGIRYEPLSFLPEYTPTRYFLIANGTKRDITKEVLKLAYSSRPLKSLYGFWSWEKNEWVVSFRMYNLPVVYRVSGKCREALYIDGLPIAEYNDSYVLLGNGTLSWRNYTVETPRKTYYWLDYQEDENVYHHVWVQVYRKNDHPLVAFLWEIRQNGTTTEGFTAYELTDEGFKIFNTTDERELGKNLIPPRYIPVNGEYIPNNETGTLQIDHENNTAFIINNGRRIPISYALADKTEAVVVGNNTFLLITWRDAYIVPPYYEPLSVLGLPLCSDLNTGMRENIPKISVLAVVAVILVGIILWRLETR

SEQ ID NO: 1271 - protein, 192 aa, Thermococcus kodakaraensis KOD1
  misc_feature (321437)..(321437): n is a or c or g or t.
  misc_feature (527833)..(527833): n is a or c or g or t.
  misc_feature (527901)..(527901): n is a or c or g or t.
  misc_feature (527978)..(527978): n is a or c or g or t.
  misc_feature (960838)..(960839): n is a or c or g or t.
  misc_feature (960860)..(960861): n is a or c or g or t.
  misc_feature (960872)..(960873): n is a or c or g or t.
  misc_feature (960879)..(960879): n is a or c or g or t.
  misc_feature (960890)..(960890): n is a or c or g or t.
  misc_feature (1250239)..(1250239): n is a or c or g or t.
  misc_feature (1302432)..(1302434): n is a or c or g or t.
  misc_feature (1302471)..(1302471): n is a or c or g or t.
  misc_feature (1302488)..(1302488): n is a or c or g or t.
  misc_feature (1674836)..(1674836): n is a or c or g or t.
MVTIPRPIDPREIRKIRKELGITQEELAKKAGVTQAYIAKLEAGKVDPRLSTLNRILQALLECKKAQPKARDVMSSPVISVKPYDSVEKVIRLMNEHNISQIPVISGNKVVGSITERTLVRQSLEYDDIYGHKVVEVMEEPFPIVNEDEDLEVVKYLLEDHPAVLVQDKAGKIVGIITRVDLFRLGKTLSRE

SEQ ID NO: 1272 - protein, 131 aa, Thermococcus kodakaraensis KOD1
  misc_feature (321437)..(321437): n is a or c or g or t.
  misc_feature (527833)..(527833): n is a or c or g or t.
  misc_feature (527901)..(527901): n is a or c or g or t.
  misc_feature (527978)..(527978): n is a or c or g or t.
  misc_feature (960838)..(960839): n is a or c or g or t.
  misc_feature (960860)..(960861): n is a or c or g or t.
  misc_feature (960872)..(960873): n is a or c or g or t.
  misc_feature (960879)..(960879): n is a or c or g or t.
  misc_feature (960890)..(960890): n is a or c or g or t.
  misc_feature (1250239)..(1250239): n is a or c or g or t.
  misc_feature (1302432)..(1302434): n is a or c or g or t.
  misc_feature (1302471)..(1302471): n is a or c or g or t.
  misc_feature (1302488)..(1302488): n is a or c or g or t.
  misc_feature (1674836)..(1674836): n is a or c or g or t.
VMNMKVRDIVEKLPERPKKSVFKCYEKCGLPEMEAELEPEVDREIIEFLKALSNPIRLKILKLTRDNWLCVCLLSEVLGEDQTLISHHLRTLKTLDLVKERREGRMRFYKANTERIEELLKKVEGVLVGYE

SEQ ID NO: 1273 - protein, 152 aa, Thermococcus kodakaraensis KOD1
  misc_feature (321437)..(321437): n is a or c or g or t.
  misc_feature (527833)..(527833): n is a or c or g or t.
  misc_feature (527901)..(527901): n is a or c or g or t.
  misc_feature (527978)..(527978): n is a or c or g or t.
  misc_feature (960838)..(960839): n is a or c or g or t.
  misc_feature (960860)..(960861): n is a or c or g or t.
  misc_feature (960872)..(960873): n is a or c or g or t.
  misc_feature (960879)..(960879): n is a or c or g or t.
  misc_feature (960890)..(960890): n is a or c or g or t.
  misc_feature (1250239)..(1250239): n is a or c or g or t.
  misc_feature (1302432)..(1302434): n is a or c or g or t.
  misc_feature (1302471)..(1302471): n is a or c or g or t.
  misc_feature (1302488)..(1302488): n is a or c or g or t.
  misc_feature (1674836)..(1674836): n is a or c or g or t.
VAVMADKINPVDLRILKLLSKNARLTYKELAELLGTTRQRISRRMNRLEQSGVILKYTVIPDYDALGYVHVVLGITLKPGANVKDAIEALKEDEHVKVIQRALGSHNLVIHVIGPKDMRELERIISEISKKVPAIDHMDVTFITETIKFETL

SEQ ID NO: 1274 - protein, 145 aa, Thermococcus kodakaraensis KOD1
  misc_feature (321437)..(321437): n is a or c or g or t.
  misc_feature (527833)..(527833): n is a or c or g or t.
  misc_feature (527901)..(527901): n is a or c or g or t.
  misc_feature (527978)..(527978): n is a or c or g or t.
  misc_feature (960838)..(960839): n is a or c or g or t.
  misc_feature (960860)..(960861): n is a or c or g or t.
  misc_feature (960872)..(960873): n is a or c or g or t.
  misc_feature (960879)..(960879): n is a or c or g or t.
  misc_feature (960890)..(960890): n is a or c or g or t.
  misc_feature (1250239)..(1250239): n is a or c or g or t.
  misc_feature (1302432)..(1302434): n is a or c or g or t.
  misc_feature (1302471)..(1302471): n is a or c or g or t.
  misc_feature (1302488)..(1302488): n is a or c or g or t.
  misc_feature (1674836)..(1674836): n is a or c or g or t.
VLIFLLVEAAVKEDIFWAATFASIATVNGDTLASELGKVLGRKPRLITNLKPVNPGTNGAVSVQGEVIALIGALMIAPFALPLTTHTWKMLLAVTIGGFVGVNLDSLIGATLEEKGITDNNSTNFLASLLGGLIGAALFYALEML

SEQ ID NO: 1275 - protein, 51 aa, Thermococcus kodakaraensis KOD1
  misc_feature (321437)..(321437): n is a or c or g or t.
  misc_feature (527833)..(527833): n is a or c or g or t.
  misc_feature (527901)..(527901): n is a or c or g or t.
  misc_feature (527978)..(527978): n is a or c or g or t.
  misc_feature (960838)..(960839): n is a or c or g or t.
  misc_feature (960860)..(960861): n is a or c or g or t.
  misc_feature (960872)..(960873): n is a or c or g or t.
  misc_feature (960879)..(960879): n is a or c or g or t.
  misc_feature (960890)..(960890): n is a or c or g or t.
  misc_feature (1250239)..(1250239): n is a or c or g or t.
  misc_feature (1302432)..(1302434): n is a or c or g or t.
  misc_feature (1302471)..(1302471): n is a or c or g or t.
  misc_feature (1302488)..(1302488): n is a or c or g or t.
  misc_feature (1674836)..(1674836): n is a or c or g or t.
VPGTGRLRNISIIKPFKLFTLPKDIVLNGKLIGKLDRPTLKQLLSNIHSLF

SEQ ID NO: 1276 - protein, 189 aa, Thermococcus kodakaraensis KOD1
  misc_feature (321437)..(321437): n is a or c or g or t.
  misc_feature (527833)..(527833): n is a or c or g or t.
  misc_feature (527901)..(527901): n is a or c or g or t.
  misc_feature (527978)..(527978): n is a or c or g or t.
  misc_feature (960838)..(960839): n is a or c or g or t.
  misc_feature (960860)..(960861): n is a or c or g or t.
  misc_feature (960872)..(960873): n is a or c or g or t.
  misc_feature (960879)..(960879): n is a or c or g or t.
  misc_feature (960890)..(960890): n is a or c or g or t.
  misc_feature (1250239)..(1250239): n is a or c or g or t.
  misc_feature (1302432)..(1302434): n is a or c or g or t.
  misc_feature (1302471)..(1302471): n is a or c or g or t.
  misc_feature (1302488)..(1302488): n is a or c or g or t.
  misc_feature (1674836)..(1674836): n is a or c or g or t.
VVAMAFLSFGSKKGKVQKMLEESQFELLLQEAVKDKKIREALFELLSSNNPGVVGDALLTITNLVESNPDVVKGHFNEDTFRKILGLTESRNPYVRENAMTLAYAIVKTYPELLDKYRAWIVEELGKQLETGDKNQKGFALMIIGELGLRELSEKVREFVDVEDKVILPFEGKKWVKLGDIAKEALEKL

SEQ ID NO: 1277 - protein, 166 aa, Thermococcus kodakaraensis KOD1
  misc_feature (321437)..(321437): n is a or c or g or t.
  misc_feature (527833)..(527833): n is a or c or g or t.
  misc_feature (527901)..(527901): n is a or c or g or t.
  misc_feature (527978)..(527978): n is a or c or g or t.
  misc_feature (960838)..(960839): n is a or c or g or t.
  misc_feature (960860)..(960861): n is a or c or g or t.
  misc_feature (960872)..(960873): n is a or c or g or t.
  misc_feature (960879)..(960879): n is a or c or g or t.
  misc_feature (960890)..(960890): n is a or c or g or t.
  misc_feature (1250239)..(1250239): n is a or c or g or t.
  misc_feature (1302432)..(1302434): n is a or c or g or t.
  misc_feature (1302471)..(1302471): n is a or c or g or t.
  misc_feature (1302488)..(1302488): n is a or c or g or t.
  misc_feature (1674836)..(1674836): n is a or c or g or t.
MWGRIEHYFDEYPVRKLIAKTLLKYGLRVSDDMKIKAGDIEVPYTKIAKALDVDRRVVKETVGMILKVPELRDIYTNLEPTVHMKYVGRHVGYGVIEIEPEPRAVGILAKIAQKIAEHDINIIQVVAEDPELYPEATLTIITERPIPGDLINELSKLEGVKRISIY

SEQ ID NO: 1278 - protein, 84 aa, Thermococcus kodakaraensis KOD1
  misc_feature (321437)..(321437): n is a or c or g or t.
  misc_feature (527833)..(527833): n is a or c or g or t.
  misc_feature (527901)..(527901): n is a or c or g or t.
  misc_feature (527978)..(527978): n is a or c or g or t.
  misc_feature (960838)..(960839): n is a or c or g or t.
  misc_feature (960860)..(960861): n is a or c or g or t.
  misc_feature (960872)..(960873): n is a or c or g or t.
  misc_feature (960879)..(960879): n is a or c or g or t.
  misc_feature (960890)..(960890): n is a or c or g or t.
  misc_feature (1250239)..(1250239): n is a or c or g or t.
  misc_feature (1302432)..(1302434): n is a or c or g or t.
  misc_feature (1302471)..(1302471): n is a or c or g or t.
  misc_feature (1302488)..(1302488): n is a or c or g or t.
  misc_feature (1674836)..(1674836): n is a or c or g or t.
MIGIGVYLALIAIATLLSMYRFMVGPTTPDRLVAVDIMTTITTGLMVLFALYYKRIIFLDVALVYAILAFGGVIAFARYMEGGL

SEQ ID NO: 1279 - protein, 242 aa, Thermococcus kodakaraensis KOD1
  misc_feature (321437)..(321437): n is a or c or g or t.
  misc_feature (527833)..(527833): n is a or c or g or t.
  misc_feature (527901)..(527901): n is a or c or g or t.
  misc_feature (527978)..(527978): n is a or c or g or t.
  misc_feature (960838)..(960839): n is a or c or g or t.
  misc_feature (960860)..(960861): n is a or c or g or t.
  misc_feature (960872)..(960873): n is a or c or g or t.
  misc_feature (960879)..(960879): n is a or c or g or t.
  misc_feature (960890)..(960890): n is a or c or g or t.
  misc_feature (1250239)..(1250239): n is a or c or g or t.
  misc_feature (1302432)..(1302434): n is a or c or g or t.
  misc_feature (1302471)..(1302471): n is a or c or g or t.
  misc_feature (1302488)..(1302488): n is a or c or g or t.
  misc_feature (1674836)..(1674836): n is a or c or g or t.
VVGEMVSILKRSLAIITLLIVGYWLAQGLAGVPFGEDKMLVGHYYLQHVKEQTGAVNAVTAIVVNYRGFDTLGEVTVLFIASTGVAALLWRKKRERTAKVEGSVVLTTGAELLFPFIVMFGAYIFIHGHLTPGGGFPGGATIATAFLLLYMAFTIYEIPHKAFEKVEGLAGMSYVLVGLIGLAIGGYFLFDWIWQTWHWGTDNIGRLFSGGFIPIIYTIIGIKVGTELSGIVDNMLKEEVRE

SEQ ID NO: 1280 - protein, 616 aa, Thermococcus kodakaraensis KOD1
  misc_feature (321437)..(321437): n is a or c or g or t.
  misc_feature (527833)..(527833): n is a or c or g or t.
  misc_feature (527901)..(527901): n is a or c or g or t.
  misc_feature (527978)..(527978): n is a or c or g or t.
  misc_feature (960838)..(960839): n is a or c or g or t.
  misc_feature (960860)..(960861): n is a or c or g or t.
  misc_feature (960872)..(960873): n is a or c or g or t.
  misc_feature (960879)..(960879): n is a or c or g or t.
  misc_feature (960890)..(960890): n is a or c or g or t.
  misc_feature (1250239)..(1250239): n is a or c or g or t.
  misc_feature (1302432)..(1302434): n is a or c or g or t.
  misc_feature (1302471)..(1302471): n is a or c or g or t.
  misc_feature (1302488)..(1302488): n is a or c or g or t.
  misc_feature (1674836)..(1674836): n is a or c or g or t.
MNEIPIILFTPLLAGVLAWLINVKGVRELIGVIGAATPLAFLAKLYPTIVNNPNNPITYQMTVSGFKVTFTLGMLNWYFAAIASLVGLAMAFGMVSTSKNGYDWLFALMSYTGVLGVFLSWDFVSFFLLWELMTFASFMMVLKRNRHESLKYFVLSVIGAYAMLLAIALIYAKTGALDFDSIRQALYMDAMLGSISKGETALIFVLFLTAFGVKAGAWPLHVWAPGAYSETDQSYTTFFSGALSKAGAYGFLLLYILMGAKLYYALGTFHGHLTFAYIIAWIGAITVVVASFLAVLQEDIRKLFAYSSVGQVGYILLAFGLGTGLGFAGGLFHVLSHAVFKGLFWLVTAAIILQTGKTQFKDFGGLAEKMPFTFAMGLIAVLSLAGIPPMAGFASKWLIYEAAISAHMPLVAGAIFLGSALAFAYVVRFLYAVWFGQRPSDLEDVKEAPLPLLIAMAILAIPNIVFGIAPGLVTNYLNKALGGEVVGGNYYKLVTQTGTYNALTVALLLVVGLAIAGLIYLYGAKARRIPVTNTYQSGNPVTEEFNLSIRRNFYLPLKEALAFWLRYSFDKFYERIAQLSEDFADTLREGFYNGNVQAYSWYLAIVLVILALWGVL

SEQ ID NO: 1281 - protein, 297 aa, Thermococcus kodakaraensis KOD1
  misc_feature (321437)..(321437): n is a or c or g or t.
  misc_feature (527833)..(527833): n is a or c or g or t.
  misc_feature (527901)..(527901): n is a or c or g or t.
  misc_feature (527978)..(527978): n is a or c or g or t.
  misc_feature (960838)..(960839): n is a or c or g or t.
  misc_feature (960860)..(960861): n is a or c or g or t.
  misc_feature (960872)..(960873): n is a or c or g or t.
  misc_feature (960879)..(960879): n is a or c or g or t.
  misc_feature (960890)..(960890): n is a or c or g or t.
  misc_feature (1250239)..(1250239): n is a or c or g or t.
  misc_feature (1302432)..(1302434): n is a or c or g or t.
  misc_feature (1302471)..(1302471): n is a or c or g or t.
  misc_feature (1302488)..(1302488): n is a or c or g or t.
  misc_feature (1674836)..(1674836): n is a or c or g or t.
MIDWKLILETIGILIYATFMGFIFMGIERKAMARIQRRVGPPIYQPIIDTLKLLGKKESVSHGFIYDFGPVFALGASIAALLFIPIANFQLFSTNADLIVVAYLLEVPMLGIMLGAMSSGNPYSAVGVQRGLLTMVAMQLPYGLALIALIQHWGTFKLNDIVALQQAHGWSITVPALLLALIVFDIVFQAMLGLEPFDIIPAPAEISMGPMVEYGGKHAALLFTQHAVQLFAETAFFAVLFLGGASNLLELLIKQIAVLFISIFIASIYPRFTIDQAAKFFWKWPTIIGIIAVLLTM

SEQ ID NO: 1282 - protein, 198 aa, Thermococcus kodakaraensis KOD1
  misc_feature (321437)..(321437): n is a or c or g or t.
  misc_feature (527833)..(527833): n is a or c or g or t.
  misc_feature (527901)..(527901): n is a or c or g or t.
  misc_feature (527978)..(527978): n is a or c or g or t.
  misc_feature (960838)..(960839): n is a or c or g or t.
  misc_feature (960860)..(960861): n is a or c or g or t.
  misc_feature (960872)..(960873): n is a or c or g or t.
  misc_feature (960879)..(960879): n is a or c or g or t.
  misc_feature (960890)..(960890): n is a or c or g or t.
  misc_feature (1250239)..(1250239): n is a or c or g or t.
  misc_feature (1302432)..(1302434): n is a or c or g or t.
  misc_feature (1302471)..(1302471): n is a or c or g or t.
  misc_feature (1302488)..(1302488): n is a or c or g or t.
  misc_feature (1674836)..(1674836): n is a or c or g or t.
VARMDMNEKPKVEEKVQEEATVEEKPTLPDTKEGKLVKALLEKAPYAEGEVIRERRIKFIVPADRIHEFLELASEKFEMLMQISVVDWLKEGQFEVNYQLWSVSESVHAFVKTRVPRDEAKLPTVMDIWPVAETYEREAHEFFGIIFEGNPRLGPFILEPREYEKHPLRKDFNMLSYVKEIYGEDFDRYDESKTNYVI

SEQ ID NO: 1283 - protein, 217 aa, Thermococcus kodakaraensis KOD1
  misc_feature (321437)..(321437): n is a or c or g or t.
  misc_feature (527833)..(527833): n is a or c or g or t.
  misc_feature (527901)..(527901): n is a or c or g or t.
  misc_feature (527978)..(527978): n is a or c or g or t.
  misc_feature (960838)..(960839): n is a or c or g or t.
  misc_feature (960860)..(960861): n is a or c or g or t.
  misc_feature (960872)..(960873): n is a or c or g or t.
  misc_feature (960879)..(960879): n is a or c or g or t.
  misc_feature (960890)..(960890): n is a or c or g or t.
  misc_feature (1250239)..(1250239): n is a or c or g or t.
  misc_feature (1302432)..(1302434): n is a or c or g or t.
  misc_feature (1302471)..(1302471): n is a or c or g or t.
  misc_feature (1302488)..(1302488): n is a or c or g or t.
  misc_feature (1674836)..(1674836): n is a or c or g or t.
VMKMPARVVGEEKVKLKKSFIKPWMGIKYLFKKPVTIKIPYEKIEPAPKYRGFHTLDWKKCVGCNFCGQICPARAIEMTWIEVNGHIATRPHPKVDYGRCTFCQFCVDVCPTGALGFSENYYLTTGGLEEDLELYDWVPIHPDKVRELNEKFNDYRFPVERIKFNKETREVTYYLRDGSTIQFKILGYGLRPPKPPAKPAAKPAEKKEGPKAEEKKE

SEQ ID NO: 1284 - protein, 114 aa, Thermococcus kodakaraensis KOD1
  misc_feature (321437)..(321437): n is a or c or g or t.
  misc_feature (527833)..(527833): n is a or c or g or t.
  misc_feature (527901)..(527901): n is a or c or g or t.
  misc_feature (527978)..(527978): n is a or c or g or t.
  misc_feature (960838)..(960839): n is a or c or g or t.
  misc_feature (960860)..(960861): n is a or c or g or t.
  misc_feature (960872)..(960873): n is a or c or g or t.
  misc_feature (960879)..(960879): n is a or c or g or t.
  misc_feature (960890)..(960890): n is a or c or g or t.
  misc_feature (1250239)..(1250239): n is a or c or g or t.
  misc_feature (1302432)..(1302434): n is a or c or g or t.
  misc_feature (1302471)..(1302471): n is a or c or g or t.
  misc_feature (1302488)..(1302488): n is a or c or g or t.
  misc_feature (1674836)..(1674836): n is a or c or g or t.
VSNSMIAFRNIHNHLGISGLIMAISGVLLILLVVILAVYLQIQAWRATYEITGVEEFNQVATFLKWGAITLIILVGVLLLLIAQVFQIIAFSKLPDELEPKGQKPEYDTRIVVY

SEQ ID NO: 1285 - protein, 95 aa, Thermococcus kodakaraensis KOD1
  misc_feature (321437)..(321437): n is a or c or g or t.
  misc_feature (527833)..(527833): n is a or c or g or t.
  misc_feature (527901)..(527901): n is a or c or g or t.
  misc_feature (527978)..(527978): n is a or c or g or t.
  misc_feature (960838)..(960839): n is a or c or g or t.
  misc_feature (960860)..(960861): n is a or c or g or t.
  misc_feature (960872)..(960873): n is a or c or g or t.
  misc_feature (960879)..(960879): n is a or c or g or t.
  misc_feature (960890)..(960890): n is a or c or g or t.
  misc_feature (1250239)..(1250239): n is a or c or g or t.
  misc_feature (1302432)..(1302434): n is a or c or g or t.
  misc_feature (1302471)..(1302471): n is a or c or g or t.
  misc_feature (1302488)..(1302488): n is a or c or g or t.
  misc_feature (1674836)..(1674836): n is a or c or g or t.
VGREITDEKLQKYFKITEEALERLEIAVHEKSLLMSVARDFLTMARSYFEDAKYYYEKGDYVTAFAALNYAHGFIDAGVRLGVFKGEDDRLFAFG

SEQ ID NO: 1286 - protein, 559 aa, Thermococcus kodakaraensis KOD1
  misc_feature (321437)..(321437): n is a or c or g or t.
  misc_feature (527833)..(527833): n is a or c or g or t.
  misc_feature (527901)..(527901): n is a or c or g or t.
  misc_feature (527978)..(527978): n is a or c or g or t.
  misc_feature (960838)..(960839): n is a or c or g or t.
  misc_feature (960860)..(960861): n is a or c or g or t.
  misc_feature (960872)..(960873): n is a or c or g or t.
  misc_feature (960879)..(960879): n is a or c or g or t.
  misc_feature (960890)..(960890): n is a or c or g or t.
  misc_feature (1250239)..(1250239): n is a or c or g or t.
  misc_feature (1302432)..(1302434): n is a or c or g or t.
  misc_feature (1302471)..(1302471): n is a or c or g or t.
  misc_feature (1302488)..(1302488): n is a or c or g or t.
  misc_feature (1674836)..(1674836): n is a or c or g or t.
VVSPYRKQKLLSTPQSTTDITGGGFAMTKFIFVTGGVVSGLGKGITSASIGMLFKARGFRTTNIKIDPYLNYDAGTMNPYQHGEVFVLDDGGEVDLDLGNYERFLDTSLSFDHNITTGKVYSAVIEKERKGEYLGATVQVIPHITNEIKERIRRIARDYDVVVVEIGGTVGDIESMPFLEAARQMQIEEGRENVAFVHVTYVPRLRVVGEQKTKPTQHSVKELRSLGIQPDAIVARSEDPLEDSARRKISLFTNVPEEAVISAYDVEDTYEVPLMLEKEGLPAYLARRLGLPEREPDLEAWREMVEKYKSLTDTVEIAIVGKYVKLADSYLSIKEALKHSSVANDVKVKIRWIEAEDVERQGVKLLEGVDGIIVPGGFGARGTEGKMMAIRYARENNIPFLGICFGFQLTVVEFARNVLGLEGAHSTEIDPQTPYPVVDLMPEQRDLDRLGGTMRLGAYPVHIKPNTLARRLYGREIVYERHRHRWEVNPDYVEKFEEAGLVFSGIAGDDERRMEILELPGHSYFIATQFHPEFKSRPMRPAPVFRGLVEAAKKKKYGS

SEQ ID NO: 1287 - protein, 25 aa, Thermococcus kodakaraensis KOD1
  misc_feature (321437)..(321437): n is a or c or g or t.
  misc_feature (527833)..(527833): n is a or c or g or t.
  misc_feature (527901)..(527901): n is a or c or g or t.
  misc_feature (527978)..(527978): n is a or c or g or t.
  misc_feature (960838)..(960839): n is a or c or g or t.
  misc_feature (960860)..(960861): n is a or c or g or t.
  misc_feature (960872)..(960873): n is a or c or g or t.
  misc_feature (960879)..(960879): n is a or c or g or t.
  misc_feature (960890)..(960890): n is a or c or g or t.
  misc_feature (1250239)..(1250239): n is a or c or g or t.
  misc_feature (1302432)..(1302434): n is a or c or g or t.
  misc_feature (1302471)..(1302471): n is a or c or g or t.
  misc_feature (1302488)..(1302488): n is a or c or g or t.
  misc_feature (1674836)..(1674836): n is a or c or g or t.
VMRVIVLENASNAPIPPPMGVIEKT

SEQ ID NO: 1288 - protein, 492 aa, Thermococcus kodakaraensis KOD1
  misc_feature (321437)..(321437): n is a or c or g or t.
  misc_feature (527833)..(527833): n is a or c or g or t.
  misc_feature (527901)..(527901): n is a or c or g or t.
  misc_feature (527978)..(527978): n is a or c or g or t.
  misc_feature (960838)..(960839): n is a or c or g or t.
  misc_feature (960860)..(960861): n is a or c or g or t.
  misc_feature (960872)..(960873): n is a or c or g or t.
  misc_feature (960879)..(960879): n is a or c or g or t.
  misc_feature (960890)..(960890): n is a or c or g or t.
  misc_feature (1250239)..(1250239): n is a or c or g or t.
  misc_feature (1302432)..(1302434): n is a or c or g or t.
  misc_feature (1302471)..(1302471): n is a or c or g or t.
  misc_feature (1302488)..(1302488): n is a or c or g or t.
  misc_feature (1674836)..(1674836): n is a or c or g or t.
MLDFRKHINVSDDFFVVRNLTGSILEGVGVAYLVPALLVWVYPEEIKYVPYFALPGMASILFGAWLSRHSSKIEDVNLRQAMVAAAFTWLLASLVSVVPFVKIAHMPLLDSYFECMSAWTGTGLTMMSNLQSYPKMLLFWRAWMQWLGGIGIVLVALTVLIRPGVAAARLYRAEARSERILPNLVNTAKVIFEIYLVLTLVGVYLYYINGMGLFDALTHSMTGLGTGGMSTHDESIGFFHSPAINAVTIFLMIMGAVNFTVHYRVFKDRSLKPFFADIQVRYMFFFLIPAVSLIAYGLVQVGDSLAQALQDAVFHAVSAISCTGFQISDLSKYPEVGKFLLAVLMVIGGGAGSTAGGIKLIRITLMYESLKWTIESAILPKGAVIKRKVGNYVFSEEDIQEVMSFTMTYVAFLLAGVLYTMLRVHANLADALFEVASAQGNVGLSVGITSPAMPADLKFVYILLMWIGRLEIFSTLVFIISVFFLLPRGLRR

SEQ ID NO: 1289 - protein, 224 aa, Thermococcus kodakaraensis KOD1
  misc_feature (321437)..(321437): n is a or c or g or t.
  misc_feature (527833)..(527833): n is a or c or g or t.
  misc_feature (527901)..(527901): n is a or c or g or t.
  misc_feature (527978)..(527978): n is a or c or g or t.
  misc_feature (960838)..(960839): n is a or c or g or t.
  misc_feature (960860)..(960861): n is a or c or g or t.
  misc_feature (960872)..(960873): n is a or c or g or t.
  misc_feature (960879)..(960879): n is a or c or g or t.
  misc_feature (960890)..(960890): n is a or c or g or t.
  misc_feature (1250239)..(1250239): n is a or c or g or t.
  misc_feature (1302432)..(1302434): n is a or c or g or t.
  misc_feature (1302471)..(1302471): n is a or c or g or t.
  misc_feature (1302488)..(1302488): n is a or c or g or t.
  misc_feature (1674836)..(1674836): n is a or c or g or t.
MYAELSPGTKKVYTQVRYLDDYHWEIEGSTITGIHKKSNVKVVIDVAKNREEADSLAGKDVNGIHIVAIPDNGVFYIKNGSFVLTYRYLKATLADINDHIVWSGFKVVEDNGKLVQEDVYEYLGAALVNHIKNNALAGQDYIFWQFYKCEECGKYVDIENLEAHLREHGIKLHEKSEEHYEVFELNFREGKVFDKFGGEVPMDKFSSEAREFIKEVLSGGHQGG

SEQ ID NO: 1290 - protein, 183 aa, Thermococcus kodakaraensis KOD1
  misc_feature (321437)..(321437): n is a or c or g or t.
  misc_feature (527833)..(527833): n is a or c or g or t.
  misc_feature (527901)..(527901): n is a or c or g or t.
  misc_feature (527978)..(527978): n is a or c or g or t.
  misc_feature (960838)..(960839): n is a or c or g or t.
  misc_feature (960860)..(960861): n is a or c or g or t.
  misc_feature (960872)..(960873): n is a or c or g or t.
  misc_feature (960879)..(960879): n is a or c or g or t.
  misc_feature (960890)..(960890): n is a or c or g or t.
  misc_feature (1250239)..(1250239): n is a or c or g or t.
  misc_feature (1302432)..(1302434): n is a or c or g or t.
  misc_feature (1302471)..(1302471): n is a or c or g or t.
  misc_feature (1302488)..(1302488): n is a or c or g or t.
  misc_feature (1674836)..(1674836): n is a or c or g or t.
MMKELKKGRMAVIDVFGSRYSPVHVELPGVFYLDSAEPETINPKIDAIYSKLVEEKGPRLFRMIYTLDGVAVMFDEGRTIKLLNQTIAEKSVTTPESVLLIALNSDVVSRSFLAWTVSLSDYAIFVSSKVTEEGIRELLYTVKSVNIDFEPGVYSLEIRKGEERIHLEKLSTSELRPSAEEQW

SEQ ID NO: 1291 - protein, 334 aa, Thermococcus kodakaraensis KOD1
  misc_feature (321437)..(321437): n is a or c or g or t.
  misc_feature (527833)..(527833): n is a or c or g or t.
  misc_feature (527901)..(527901): n is a or c or g or t.
  misc_feature (527978)..(527978): n is a or c or g or t.
  misc_feature (960838)..(960839): n is a or c or g or t.
  misc_feature (960860)..(960861): n is a or c or g or t.
  misc_feature (960872)..(960873): n is a or c or g or t.
  misc_feature (960879)..(960879): n is a or c or g or t.
  misc_feature (960890)..(960890): n is a or c or g or t.
  misc_feature (1250239)..(1250239): n is a or c or g or t.
  misc_feature (1302432)..(1302434): n is a or c or g or t.
  misc_feature (1302471)..(1302471): n is a or c or g or t.
  misc_feature (1302488)..(1302488): n is a or c or g or t.
  misc_feature (1674836)..(1674836): n is a or c or g or t.
MDDRIWKYVSAVLTLLLALSIVSVAVLYYQVNPPAVPANQTGFVIETPSNFTLVCEGSVNTTSTEVAELRDQIAFLQRLVSSNQGGTTIAVVPIFGIIDDYTALQVIPLLRNLAMNESVGGVLLWIESPGGVVGPVINIHSEIKKLSLVKPVVAYSGDIIASGGYYIAVGAQKIVASPLAEVGSIGVIYVHYDLEKNYEMNGIKVNVFKTGKHKDMGAEWRDLTPEEREKITEMVNTYFQAFISAVSEGRNMTIDEVKNFSTGETWFAENVTGALVDELGGMDTAIDVLEKLMNVSGAKVVVYKDLETPEEFGVYGSTALYIDPRYLTPLIGGG

SEQ ID NO: 1292 - protein, 159 aa, Thermococcus kodakaraensis KOD1
  misc_feature (321437)..(321437): n is a or c or g or t.
  misc_feature (527833)..(527833): n is a or c or g or t.
  misc_feature (527901)..(527901): n is a or c or g or t.
  misc_feature (527978)..(527978): n is a or c or g or t.
  misc_feature (960838)..(960839): n is a or c or g or t.
  misc_feature (960860)..(960861): n is a or c or g or t.
  misc_feature (960872)..(960873): n is a or c or g or t.
  misc_feature (960879)..(960879): n is a or c or g or t.
  misc_feature (960890)..(960890): n is a or c or g or t.
  misc_feature (1250239)..(1250239): n is a or c or g or t.
  misc_feature (1302432)..(1302434): n is a or c or g or t.
  misc_feature (1302471)..(1302471): n is a or c or g or t.
  misc_feature (1302488)..(1302488): n is a or c or g or t.
  misc_feature (1674836)..(1674836): n is a or c or g or t.
MLCEEKLEVFENGFEDGKFNLRIEYYGKDARRLLLAVIRELYLPDYGEDYVYPFECAKEFWGIYMDASEIRGEEPRLAPVKFLNQSILNRLEKVLSEIDAPAEVKELIDFEKAEVAKLGKGLLALGKNFILDERGYLFIFNKPSVRELILKYMGMLDES

SEQ ID NO: 1293 - protein, 138 aa, Thermococcus kodakaraensis KOD1
  misc_feature (321437)..(321437): n is a or c or g or t.
  misc_feature (527833)..(527833): n is a or c or g or t.
  misc_feature (527901)..(527901): n is a or c or g or t.
  misc_feature (527978)..(527978): n is a or c or g or t.
  misc_feature (960838)..(960839): n is a or c or g or t.
  misc_feature (960860)..(960861): n is a or c or g or t.
  misc_feature (960872)..(960873): n is a or c or g or t.
  misc_feature (960879)..(960879): n is a or c or g or t.
  misc_feature (960890)..(960890): n is a or c or g or t.
  misc_feature (1250239)..(1250239): n is a or c or g or t.
  misc_feature (1302432)..(1302434): n is a or c or g or t.
  misc_feature (1302471)..(1302471): n is a or c or g or t.
  misc_feature (1302488)..(1302488): n is a or c or g or t.
  misc_feature (1674836)..(1674836): n is a or c or g or t.
MVGKAQTTLSDVMPVVVALGPKGFYVIRPKDGESEILASFPEDLNRVAFALFETYAEPLPFEWVRQKLKQLLHYLDLHEAYLIDGDLVAIIDGKPYGLKTYPEVIADTRRLFGNDMELFLNIVYDLMKDLKKHFASSR

SEQ ID NO: 1294 - protein, 226 aa, Thermococcus kodakaraensis KOD1
  misc_feature (321437)..(321437): n is a or c or g or t.
  misc_feature (527833)..(527833): n is a or c or g or t.
  misc_feature (527901)..(527901): n is a or c or g or t.
  misc_feature (527978)..(527978): n is a or c or g or t.
  misc_feature (960838)..(960839): n is a or c or g or t.
  misc_feature (960860)..(960861): n is a or c or g or t.
  misc_feature (960872)..(960873): n is a or c or g or t.
  misc_feature (960879)..(960879): n is a or c or g or t.
  misc_feature (960890)..(960890): n is a or c or g or t.
  misc_feature (1250239)..(1250239): n is a or c or g or t.
  misc_feature (1302432)..(1302434): n is a or c or g or t.
  misc_feature (1302471)..(1302471): n is a or c or g or t.
  misc_feature (1302488)..(1302488): n is a or c or g or t.
  misc_feature (1674836)..(1674836): n is a or c or g or t.
VAGSLGATFLNVKVSDVLSKYFGESSKLVASIYHLAREKSPSIVFIDEFDALAMKRSSLEDAARRVLSTFLVEIDGFKRSDTNERVVTLAATNRPWDLDDAILSRFPLRVYVPLPDESSAVEILRIHLSGFRVKANLRAVAKEAVRRRYSGRDLANLARLAITKMLSDMNPELSEPQLIPSLVGKELTVRPIEMEDFRYGLRRIKSPITPALIKKYEMWAREYGSY

SEQ ID NO: 1295 - protein, 288 aa, Thermococcus kodakaraensis KOD1
  misc_feature (321437)..(321437): n is a or c or g or t.
  misc_feature (527833)..(527833): n is a or c or g or t.
  misc_feature (527901)..(527901): n is a or c or g or t.
  misc_feature (527978)..(527978): n is a or c or g or t.
  misc_feature (960838)..(960839): n is a or c or g or t.
  misc_feature (960860)..(960861): n is a or c or g or t.
  misc_feature (960872)..(960873): n is a or c or g or t.
  misc_feature (960879)..(960879): n is a or c or g or t.
  misc_feature (960890)..(960890): n is a or c or g or t.
  misc_feature (1250239)..(1250239): n is a or c or g or t.
  misc_feature (1302432)..(1302434): n is a or c or g or t.
  misc_feature (1302471)..(1302471): n is a or c or g or t.
  misc_feature (1302488)..(1302488): n is a or c or g or t.
  misc_feature (1674836)..(1674836): n is a or c or g or t.
MAKEIYSRYPMVKYLRKEALPTALCPGCGGGTVLNAFANAVDQLRIDPKDLVVVSGIGCSAWIASPYFLADTLHTTHGRAIAFATGVKVGLPDKKVVVISGDGDLASIGGNHLIHAARRNIDITVILVNNMIYGMTGGQVAPTTPFGAKTTTTPYRNIEHPLQISETVAAAGASYVARWTTAHVYQLIESIKKALQVKGFSLVEVVSQCPVQFGRRNRMKEPAEMLRWFLKNSVPISKAKKMSPEELEDKFVIGEFVNRERPEFVSELNKLIDEVQEHFGLKGEDDGV

SEQ ID NO: 1296 - protein, 131 aa, Thermococcus kodakaraensis KOD1
  misc_feature (321437)..(321437): n is a or c or g or t.
  misc_feature (527833)..(527833): n is a or c or g or t.
  misc_feature (527901)..(527901): n is a or c or g or t.
  misc_feature (527978)..(527978): n is a or c or g or t.
  misc_feature (960838)..(960839): n is a or c or g or t.
  misc_feature (960860)..(960861): n is a or c or g or t.
  misc_feature (960872)..(960873): n is a or c or g or t.
  misc_feature (960879)..(960879): n is a or c or g or t.
  misc_feature (960890)..(960890): n is a or c or g or t.
  misc_feature (1250239)..(1250239): n is a or c or g or t.
  misc_feature (1302432)..(1302434): n is a or c or g or t.
  misc_feature (1302471)..(1302471): n is a or c or g or t.
  misc_feature (1302488)..(1302488): n is a or c or g or t.
  misc_feature (1674836)..(1674836): n is a or c or g or t.
MNADEIRALLRKAEERLAASRELFERGHYAFAISSAYYVMFYCARALLLSKGITPKSHAGVHAQLGKEFVKTGEMPARLYTGYSKALNMRHTADYDAFVEYTERDAREVLRYAEEFLAFTKSYLEGKNDAD

SEQ ID NO: 1297 - protein, 382 aa, Thermococcus kodakaraensis KOD1
  misc_feature (321437)..(321437): n is a or c or g or t.
  misc_feature (527833)..(527833): n is a or c or g or t.
  misc_feature (527901)..(527901): n is a or c or g or t.
  misc_feature (527978)..(527978): n is a or c or g or t.
  misc_feature (960838)..(960839): n is a or c or g or t.
  misc_feature (960860)..(960861): n is a or c or g or t.
  misc_feature (960872)..(960873): n is a or c or g or t.
  misc_feature (960879)..(960879): n is a or c or g or t.
  misc_feature (960890)..(960890): n is a or c or g or t.
  misc_feature (1250239)..(1250239): n is a or c or g or t.
  misc_feature (1302432)..(1302434): n is a or c or g or t.
  misc_feature (1302471)..(1302471): n is a or c or g or t.
  misc_feature (1302488)..(1302488): n is a or c or g or t.
  misc_feature (1674836)..(1674836): n is a or c or g or t.
MRYPFPVGKADFIQGDEAIARAAILAGCRFYAGYPITPASEIFEAMALYMPLVDGVSIQMEDEIASIAAIIGASWAGAKAMTATSGPGFSLMQENIGYAVMTETPIVVVDVQRGGPSTGQPTLAAQGDIMQSIWGTHGDHTLIVLSPSTVQEAFDFTIRAFNLAEKYRTPVVLLTDAEVAHMRERVYIPNPDDIELVYRKLPQNEEEAKLPFGDPHGDGIPPMPIFGKGYRTYVTGLTHDERGRPKTVDAEVHERLIKRIIGKIENNKHDIISYEKFELDDADVAIVSTGIVSRSAIRAVKILREKGIKAGLLKLNTIWPFDFDMMEELAEQVKKIFVPEMNMGQLYHLVKEGANGKAEVELISKIGGEVHTPMEIVERVVG

SEQ ID NO: 1298 - protein, 157 aa, Thermococcus kodakaraensis KOD1
  misc_feature (321437)..(321437): n is a or c or g or t.
  misc_feature (527833)..(527833): n is a or c or g or t.
  misc_feature (527901)..(527901): n is a or c or g or t.
  misc_feature (527978)..(527978): n is a or c or g or t.
  misc_feature (960838)..(960839): n is a or c or g or t.
  misc_feature (960860)..(960861): n is a or c or g or t.
  misc_feature (960872)..(960873): n is a or c or g or t.
  misc_feature (960879)..(960879): n is a or c or g or t.
  misc_feature (960890)..(960890): n is a or c or g or t.
  misc_feature (1250239)..(1250239): n is a or c or g or t.
  misc_feature (1302432)..(1302434): n is a or c or g or t.
  misc_feature (1302471)..(1302471): n is a or c or g or t.
  misc_feature (1302488)..(1302488): n is a or c or g or t.
  misc_feature (1674836)..(1674836): n is a or c or g or t.
MIINETKGKAWHGKVKLADTFLKRFRGLMLVKNVNHALVFVLPAETRANASIHMFFMLSDIDVIWLDSSRRVVDFKTAKKWRLYTPKKAAQYIIEGPVGLIRTLEVEEGDLISWTPTEEREKAVPVKSLIPGKINLNGSKNSIAMVESVKEVKANEV

SEQ ID NO: 1299 - protein, 189 aa, Thermococcus kodakaraensis KOD1
  misc_feature (321437)..(321437): n is a or c or g or t.
  misc_feature (527833)..(527833): n is a or c or g or t.
  misc_feature (527901)..(527901): n is a or c or g or t.
  misc_feature (527978)..(527978): n is a or c or g or t.
  misc_feature (960838)..(960839): n is a or c or g or t.
  misc_feature (960860)..(960861): n is a or c or g or t.
  misc_feature (960872)..(960873): n is a or c or g or t.
  misc_feature (960879)..(960879): n is a or c or g or t.
  misc_feature (960890)..(960890): n is a or c or g or t.
  misc_feature (1250239)..(1250239): n is a or c or g or t.
  misc_feature (1302432)..(1302434): n is a or c or g or t.
  misc_feature (1302471)..(1302471): n is a or c or g or t.
  misc_feature (1302488)..(1302488): n is a or c or g or t.
  misc_feature (1674836)..(1674836): n is a or c or g or t.
MEYKRPIGLDIDLETGVIPGAKKLVRRLSDLKGYFLDEEAYNELLKEDPVVYEVYAIEQEEKEGDLNFATTVLYPGKVGKEFFFTKGHFHAKPDRAEIYYGIKGKGGMLLQTPEGEAEWIPMGPGTVVYVPPYWAHRTVNTGNEPFIFLAIYPADAGHDYGSIKEKGFSKIVIEEDGEVKVVDNPRWKE

SEQ ID NO: 1300 - protein, 468 aa, Thermococcus kodakaraensis KOD1
  misc_feature (321437)..(321437): n is a or c or g or t.
  misc_feature (527833)..(527833): n is a or c or g or t.
  misc_feature (527901)..(527901): n is a or c or g or t.
  misc_feature (527978)..(527978): n is a or c or g or t.
  misc_feature (960838)..(960839): n is a or c or g or t.
  misc_feature (960860)..(960861): n is a or c or g or t.
  misc_feature (960872)..(960873): n is a or c or g or t.
  misc_feature (960879)..(960879): n is a or c or g or t.
  misc_feature (960890)..(960890): n is a or c or g or t.
  misc_feature (1250239)..(1250239): n is a or c or g or t.
  misc_feature (1302432)..(1302434): n is a or c or g or t.
  misc_feature (1302471)..(1302471): n is a or c or g or t.
  misc_feature (1302488)..(1302488): n is a or c or g or t.
  misc_feature (1674836)..(1674836): n is a or c or g or t.
VGIMKTVLLAGGKGTRLWPLSRELMPKQFVRFLDDESLFQKTVERALLFSKPSEIFVVTNKDYRFRVMDDLREIRIELPADNILLEPVGKNTLPAIVWAVLKIEEKFGPSKVAVLPSDHLIETGEAYERAFENAERLADKFLVTFGIKPNRPHTGYGYIKPGERIEEGGRLLGYRVDEFKEKPDLETAKRYVESGYYWNSGMFAFSTSLFLEEVEKHAPEVLEAFESSSSIEEAYEKAPEISIDYGVMEKTEKAAVVPLNVKWSDLGSFDAIYEVLEKDDAGNAVQIRGKKGYHIGVNSKNNLIMTERLTATVGVSDLVIIDTGDALLVAHRGETQKVKEIYRALREMNDERAIVHRTAYRPWGSYTVLEEGDRYKIKRLTVLPGKKLSLQMHYHRSEHWVVVRGTAKVIVGDRELLLRPGESTFIPAGVKHRLENPGKVVLEVIETQIGEYLGEDDIVRFVDDFGRD

SEQ ID NO: 1301 - protein, 199 aa, Thermococcus kodakaraensis KOD1
  misc_feature (321437)..(321437): n is a or c or g or t.
  misc_feature (527833)..(527833): n is a or c or g or t.
  misc_feature (527901)..(527901): n is a or c or g or t.
  misc_feature (527978)..(527978): n is a or c or g or t.
  misc_feature (960838)..(960839): n is a or c or g or t.
  misc_feature (960860)..(960861): n is a or c or g or t.
  misc_feature (960872)..(960873): n is a or c or g or t.
  misc_feature (960879)..(960879): n is a or c or g or t.
  misc_feature (960890)..(960890): n is a or c or g or t.
  misc_feature (1250239)..(1250239): n is a or c or g or t.
  misc_feature (1302432)..(1302434): n is a or c or g or t.
  misc_feature (1302471)..(1302471): n is a or c or g or t.
  misc_feature (1302488)..(1302488): n is a or c or g or t.
  misc_feature (1674836)..(1674836): n is a or c or g or t.
MKLAEAVTNVKEVEKKAEKEYKALLKTLKSPEYSDLRVLLLRMTVDTILHRRLAEALEKAYKEAIELIEEFGYVDVPETPETAPGNQVSSGLVLIPGIPAVQVAPYGLLGSRIPPEDALEELLKNLPDNVALPPEKLREIRDKLEKLRALCEKMSENYRILEQNAVHPVVQAFAESARKNEEQHKVVVDGLLKRYSEEK

SEQ ID NO: 1302 - protein, 403 aa, Thermococcus kodakaraensis KOD1
  misc_feature (321437)..(321437): n is a or c or g or t.
  misc_feature (527833)..(527833): n is a or c or g or t.
  misc_feature (527901)..(527901): n is a or c or g or t.
  misc_feature (527978)..(527978): n is a or c or g or t.
  misc_feature (960838)..(960839): n is a or c or g or t.
  misc_feature (960860)..(960861): n is a or c or g or t.
  misc_feature (960872)..(960873): n is a or c or g or t.
  misc_feature (960879)..(960879): n is a or c or g or t.
  misc_feature (960890)..(960890): n is a or c or g or t.
  misc_feature (1250239)..(1250239): n is a or c or g or t.
  misc_feature (1302432)..(1302434): n is a or c or g or t.
  misc_feature (1302471)..(1302471): n is a or c or g or t.
  misc_feature (1302488)..(1302488): n is a or c or g or t.
  misc_feature (1674836)..(1674836): n is a or c or g or t.
VVIHMIKPSERAMGVEYAIRDVVLPARELEKKGIEVIRLNIGDPGKYDFQPPEHMKEAYCRAIKEGHNYYGPSEGLPEMREAVVQREKRKNGVDITPDDVRVTTAVTEALQLLFGALLDPGDNILVPSPSYPPYTGLVKFYGGIPNEYDTIEENGWQPDIDDMRKRINERTKAIAVINPNNPTGALYEKKTVKEILDLAGEYDIPVISDEIYDLMTYEGEHVSPGSLTKDVPVIVMNGLSKVYFATGWRLGYFYYVDPENKLAEVREAVDKLMRIRICPSTPAQFAAIAGLTGPMDYLEEYMKKLKERRDYIYKRLTEIPGVSTQKPQGAFYIFPRIDERSKWKSDKEFVLDVLHEAHVLFVHGSGFGRAGNWHFRIVFLPPVEILEKAMDRFEEFMRKRLAE

SEQ ID NO: 1303 - protein, 1229 aa, Thermococcus kodakaraensis KOD1
  misc_feature (321437)..(321437): n is a or c or g or t.
  misc_feature (527833)..(527833): n is a or c or g or t.
  misc_feature (527901)..(527901): n is a or c or g or t.
  misc_feature (527978)..(527978): n is a or c or g or t.
  misc_feature (960838)..(960839): n is a or c or g or t.
  misc_feature (960860)..(960861): n is a or c or g or t.
  misc_feature (960872)..(960873): n is a or c or g or t.
  misc_feature (960879)..(960879): n is a or c or g or t.
  misc_feature (960890)..(960890): n is a or c or g or t.
  misc_feature (1250239)..(1250239): n is a or c or g or t.
  misc_feature (1302432)..(1302434): n is a or c or g or t.
  misc_feature (1302471)..(1302471): n is a or c or g or t.
  misc_feature (1302488)..(1302488): n is a or c or g or t.
  misc_feature (1674836)..(1674836): n is a or c or g or t.
MVTLIIAEKPNVARKIAYALAEGKPVRKTIGKVSYYEFTRDGKKVIVAPAVGHLFSLAPKTKTYGYPVFDIEWVPVYVAEKGKSYAKDYIKALATLAKQADEFVVACDYDTEGEVIGYTALKYACGVDPSKAKRMKFSALTKKDLLKAWYNMEPTINFGMADAGIARHVLDWYWGVNLSRALTSAIKRASGKWMVLSTGRVQGPTLKFLVEREKEIQNFEPKPYWVIKMLLEKNGGQYTAVYEKEKVWDEEEAKKIVEEAKKGPAFVEKVEVKQQNRNPPVPFDLGTLQREAYSAFGYSPKKTLDIAQKLYEKGYCLHPDSLIPTPQGVKRIKELPEKGEVFALDFDLKLSRARYRLLERDADEPMYKVTLSDRTELYLTADHPVLVYRDDQLIFVPAEELRENDQVVLFINRSEYSPRTESPTLLGFLLENATSMKDYILYDPEFGGVLRNRIKDAGLKTEILWRFRIREPTYYKYLRGKMPVPIVRFLLEEGVVSIEELREVFRGFSYSTSLTPISFEFSEEFWYLFGLVAGDGHLAKKGAITIPAKDRTEDTVKAVKEIANSLQVPFAFDEKYKMIILRSKSLTRLFELLGCPYGNKTEIFRIPGEIMAKPEWMAAFLAGYYDADGHIGTKPTGGKKSHSPQIVLTSKNRMAIYTVKQMWQLLGVGTYLWEKKDRNGNFMAYELKVYSRDAWRFYEVMKNHLRIKRKDLEHVKEVAIRKRKAYSHHYSVLNVKSWEGKIKSSNVLWKKFDMSNQTAHGRGISLDKLQRIVDYLTDTDLRRIAMGDVYVLGIRSIEKFHYRGKVYDLVVDQYHNFIANGVVVHNCSYPRTSSQKLPKNLNFRSIIQNLAKLPEYKPFAHELLGKESLKPVEGKKDDPAHPAIYPTGELPKPGELTKDEGNLYDLIVRRFLALFMEPAVRETMKVVINSNNHRFILSGARTLKEGWLKVYGKYVKFDEVILPAFKEGEPVKVIQIKREKKKTKPPARYSPAAVIKKMEDLGIGTKATRAQILETLYQRGYIEGKKKIKVTPLGMRVVEALEKNVPDIVSVELTRAFEEKMEEIMAGKADKDQVIEESKEQLIKILQVFKEKELDIGKMLLESTGTGVTTSKEAAKKTGAVKDANDEEKSDGKAGEGTTPKAERKPLVVGKCPKCGGDLVIRYNRKTGKRFVGCSNWPKCDVTYPILQRGQVIPTEKTCCNGAPVVKIREKGREYEICLDMNCKDWKKK

SEQ ID NO: 1304 - protein, 527 aa, Thermococcus kodakaraensis KOD1
  misc_feature (321437)..(321437): n is a or c or g or t.
  misc_feature (527833)..(527833): n is a or c or g or t.
  misc_feature (527901)..(527901): n is a or c or g or t.
  misc_feature (527978)..(527978): n is a or c or g or t.
  misc_feature (960838)..(960839): n is a or c or g or t.
  misc_feature (960860)..(960861): n is a or c or g or t.
  misc_feature (960872)..(960873): n is a or c or g or t.
  misc_feature (960879)..(960879): n is a or c or g or t.
  misc_feature (960890)..(960890): n is a or c or g or t.
  misc_feature (1250239)..(1250239): n is a or c or g or t.
  misc_feature (1302432)..(1302434): n is a or c or g or t.
  misc_feature (1302471)..(1302471): n is a or c or g or t.
  misc_feature (1302488)..(1302488): n is a or c or g or t.
  misc_feature (1674836)..(1674836): n is a or c or g or t.
VRAMQSMKKVIGSIEFGILSPQEIRKMSAAEITVPDTYDDDGYPIEGGLMDKRLGVIDPGLRCETCGARAGECPGHFGHIELARPVIHVGFAKTIHRVLESTCRECGRIKLTDEEIEEYMQKFEVMGDRKGAVDKLIKEIHKKAKERMVCPHCGAPQFPIKFERPTIYWELRKDEEGNEYKHRMMPSEVRDRLEKIPDKDLPLLGLHPEKSRPEWMVLTVLPVPPVTMRPSITLESGIRAEDDLTHKLVDIIRINNRLKSNIEAGAPQLIIEDLWDLLQYHVTTYINNETSGVPPAKHKSGRPLKTLAQRLKGKEGRFRGNLSGKRVNFSARTVISPDPMISINEVGVPLAVAMELTVPEKVTEFNYEKLKQRVLNGPEKYPGANYVIDPEGRRIRLMESNRELIAEKLDIGWTVERHLEDGDVVLFNRQPSLHRMSIMAHRVRVMPYRTFRLNLPVCPPYNADFDGDEMNLHVPQTEEAQAEAKILMEVQNHIISPRYGGPLIAGIQDHISGGYLLTREGALLHPL

SEQ ID NO: 1305 - protein, 102 aa, Thermococcus kodakaraensis KOD1
  misc_feature (321437)..(321437): n is a or c or g or t.
  misc_feature (527833)..(527833): n is a or c or g or t.
  misc_feature (527901)..(527901): n is a or c or g or t.
  misc_feature (527978)..(527978): n is a or c or g or t.
  misc_feature (960838)..(960839): n is a or c or g or t.
  misc_feature (960860)..(960861): n is a or c or g or t.
  misc_feature (960872)..(960873): n is a or c or g or t.
  misc_feature (960879)..(960879): n is a or c or g or t.
  misc_feature (960890)..(960890): n is a or c or g or t.
  misc_feature (1250239)..(1250239): n is a or c or g or t.
  misc_feature (1302432)..(1302434): n is a or c or g or t.
  misc_feature (1302471)..(1302471): n is a or c or g or t.
  misc_feature (1302488)..(1302488): n is a or c or g or t.
  misc_feature (1674836)..(1674836): n is a or c or g or t.
MVDFAFELRKVQDTGKIVMGAKKSIHLAKVGGAKLIIVARNARPDIKEDIYYYAKLSGIPVYEFEGTSVELGTLLGRPHTVSALAVIDPGESKILALAGGKE

SEQ ID NO: 1306 - protein, 150 aa, Thermococcus kodakaraensis KOD1
  misc_feature (321437)..(321437): n is a or c or g or t.
  misc_feature (527833)..(527833): n is a or c or g or t.
  misc_feature (527901)..(527901): n is a or c or g or t.
  misc_feature (527978)..(527978): n is a or c or g or t.
  misc_feature (960838)..(960839): n is a or c or g or t.
  misc_feature (960860)..(960861): n is a or c or g or t.
  misc_feature (960872)..(960873): n is a or c or g or t.
  misc_feature (960879)..(960879): n is a or c or g or t.
  misc_feature (960890)..(960890): n is a or c or g or t.
  misc_feature (1250239)..(1250239): n is a or c or g or t.
  misc_feature (1302432)..(1302434): n is a or c or g or t.
  misc_feature (1302471)..(1302471): n is a or c or g or t.
  misc_feature (1302488)..(1302488): n is a or c or g or t.
  misc_feature (1674836)..(1674836): n is a or c or g or t.
VMIMAGKKAPYGEFAGRKLKLKRKKFRWSDIRYKRRVLRLKEKSDPLEGAPQARGIVLEKIAVEAKQPNSAMRKAVRVQLIKNGKVVTAFTPGDGAINHIDEHDEVIIEGIGGPKGGSMGDIPGIRYKVVKVNRVSLKELVKGRKEKPRR

SEQ ID NO: 1307 - protein, 62 aa, Thermococcus kodakaraensis KOD1
  misc_feature (321437)..(321437): n is a or c or g or t.
  misc_feature (527833)..(527833): n is a or c or g or t.
  misc_feature (527901)..(527901): n is a or c or g or t.
  misc_feature (527978)..(527978): n is a or c or g or t.
  misc_feature (960838)..(960839): n is a or c or g or t.
  misc_feature (960860)..(960861): n is a or c or g or t.
  misc_feature (960872)..(960873): n is a or c or g or t.
  misc_feature (960879)..(960879): n is a or c or g or t.
  misc_feature (960890)..(960890): n is a or c or g or t.
  misc_feature (1250239)..(1250239): n is a or c or g or t.
  misc_feature (1302432)..(1302434): n is a or c or g or t.
  misc_feature (1302471)..(1302471): n is a or c or g or t.
  misc_feature (1302488)..(1302488): n is a or c or g or t.
  misc_feature (1674836)..(1674836): n is a or c or g or t.
MGRVVLDSYAVLAYLLHERGAEKIRDMFKEAENGKLELYNATLVTGDEEFKTVEDKVRIEWL

SEQ ID NO: 1308 - protein, 157 aa, Thermococcus kodakaraensis KOD1
  misc_feature (321437)..(321437): n is a or c or g or t.
  misc_feature (527833)..(527833): n is a or c or g or t.
  misc_feature (527901)..(527901): n is a or c or g or t.
  misc_feature (527978)..(527978): n is a or c or g or t.
  misc_feature (960838)..(960839): n is a or c or g or t.
  misc_feature (960860)..(960861): n is a or c or g or t.
  misc_feature (960872)..(960873): n is a or c or g or t.
  misc_feature (960879)..(960879): n is a or c or g or t.
  misc_feature (960890)..(960890): n is a or c or g or t.
  misc_feature (1250239)..(1250239): n is a or c or g or t.
  misc_feature (1302432)..(1302434): n is a or c or g or t.
  misc_feature (1302471)..(1302471): n is a or c or g or t.
  misc_feature (1302488)..(1302488): n is a or c or g or t.
  misc_feature (1674836)..(1674836): n is a or c or g or t.
MHELKKLDEKSLLAYWIKGEYDEADMYRELVRRARELGLSESLIETFICLSKESKEHGDTLRKMFLRNYGEEPTPPDIPPIEVAPLLEKFERAEDVFEVLQLAMESELLAKRIYERLAEEEKREELKKVYLSLAAVEGSHYERLKGEFEILKELKEK

SEQ ID NO: 1309 - protein, 16 aa, Thermococcus kodakaraensis KOD1
  misc_feature (321437)..(321437): n is a or c or g or t.
  misc_feature (527833)..(527833): n is a or c or g or t.
  misc_feature (527901)..(527901): n is a or c or g or t.
  misc_feature (527978)..(527978): n is a or c or g or t.
  misc_feature (960838)..(960839): n is a or c or g or t.
  misc_feature (960860)..(960861): n is a or c or g or t.
  misc_feature (960872)..(960873): n is a or c or g or t.
  misc_feature (960879)..(960879): n is a or c or g or t.
  misc_feature (960890)..(960890): n is a or c or g or t.
  misc_feature (1250239)..(1250239): n is a or c or g or t.
  misc_feature (1302432)..(1302434): n is a or c or g or t.
  misc_feature (1302471)..(1302471): n is a or c or g or t.
  misc_feature (1302488)..(1302488): n is a or c or g or t.
  misc_feature (1674836)..(1674836): n is a or c or g or t.
MARAIEKREGKLKEVK

SEQ ID NO: 1310 - protein, 80 aa, Thermococcus kodakaraensis KOD1
  misc_feature (321437)..(321437): n is a or c or g or t.
  misc_feature (527833)..(527833): n is a or c or g or t.
  misc_feature (527901)..(527901): n is a or c or g or t.
  misc_feature (527978)..(527978): n is a or c or g or t.
  misc_feature (960838)..(960839): n is a or c or g or t.
  misc_feature (960860)..(960861): n is a or c or g or t.
  misc_feature (960872)..(960873): n is a or c or g or t.
  misc_feature (960879)..(960879): n is a or c or g or t.
  misc_feature (960890)..(960890): n is a or c or g or t.
  misc_feature (1250239)..(1250239): n is a or c or g or t.
  misc_feature (1302432)..(1302434): n is a or c or g or t.
  misc_feature (1302471)..(1302471): n is a or c or g or t.
  misc_feature (1302488)..(1302488): n is a or c or g or t.
  misc_feature (1674836)..(1674836): n is a or c or g or t.
VEFEIDPLEIAEVLDEAEKKGLEIVGVFHSHLKCPPIPSEKDLRGMNLWRNVWLIVTPSGEFRAWTLENGEVKEVEVEIR

SEQ ID NO: 1311 - protein, 292 aa, Thermococcus kodakaraensis KOD1
  misc_feature (321437)..(321437): n is a or c or g or t.
  misc_feature (527833)..(527833): n is a or c or g or t.
  misc_feature (527901)..(527901): n is a or c or g or t.
  misc_feature (527978)..(527978): n is a or c or g or t.
  misc_feature (960838)..(960839): n is a or c or g or t.
  misc_feature (960860)..(960861): n is a or c or g or t.
  misc_feature (960872)..(960873): n is a or c or g or t.
  misc_feature (960879)..(960879): n is a or c or g or t.
  misc_feature (960890)..(960890): n is a or c or g or t.
  misc_feature (1250239)..(1250239): n is a or c or g or t.
  misc_feature (1302432)..(1302434): n is a or c or g or t.
  misc_feature (1302471)..(1302471): n is a or c or g or t.
  misc_feature (1302488)..(1302488): n is a or c or g or t.
  misc_feature (1674836)..(1674836): n is a or c or g or t.
MGYGRTFGLWYLKWDGRDFRSLMKYHGDTTMSTVQEKLREVGIDSLVILDTGWGIEGKSMIYTGDPGEDAYTLSEFLSENVTMPYYVEIPYYKYRSDTPRGPDYWKRWIDVFVISSDYNLRGFYWNYECPMMFEAKAVGASWETVISELANRIHEAGFEFIWIPYMHYTTKSEIEGKRVFKKDSYNHHAAYYFDWVFLQPNYYKGELLPANSDTLKQWKMYVDDAKENLRNYRGVDNIYYEFECDGAVLNNPVYRQRACDYVQVLGKPPRRAYYYDVRVEALEYLNGVCDYV

SEQ ID NO: 1312 - protein, 140 aa, Thermococcus kodakaraensis KOD1
  misc_feature (321437)..(321437): n is a or c or g or t.
  misc_feature (527833)..(527833): n is a or c or g or t.
  misc_feature (527901)..(527901): n is a or c or g or t.
  misc_feature (527978)..(527978): n is a or c or g or t.
  misc_feature (960838)..(960839): n is a or c or g or t.
  misc_feature (960860)..(960861): n is a or c or g or t.
  misc_feature (960872)..(960873): n is a or c or g or t.
  misc_feature (960879)..(960879): n is a or c or g or t.
  misc_feature (960890)..(960890): n is a or c or g or t.
  misc_feature (1250239)..(1250239): n is a or c or g or t.
  misc_feature (1302432)..(1302434): n is a or c or g or t.
  misc_feature (1302471)..(1302471): n is a or c or g or t.
  misc_feature (1302488)..(1302488): n is a or c or g or t.
  misc_feature (1674836)..(1674836): n is a or c or g or t.
MLLTYHAKERLKKRLAKRGRLERMYSELWVFLDRSKRIDVNEKITIFTDGRKALVCTRLDCERLQKSEILERVRGIMDSYECVYFDGRVAKVTRPEKFIETVPDGEYCFYLNGEKKSLYVGSEPPFLVITLRPAKREERS

SEQ ID NO: 1313 - protein, 203 aa, Thermococcus kodakaraensis KOD1
  misc_feature (321437)..(321437): n is a or c or g or t.
  misc_feature (527833)..(527833): n is a or c or g or t.
  misc_feature (527901)..(527901): n is a or c or g or t.
  misc_feature (527978)..(527978): n is a or c or g or t.
  misc_feature (960838)..(960839): n is a or c or g or t.
  misc_feature (960860)..(960861): n is a or c or g or t.
  misc_feature (960872)..(960873): n is a or c or g or t.
  misc_feature (960879)..(960879): n is a or c or g or t.
  misc_feature (960890)..(960890): n is a or c or g or t.
  misc_feature (1250239)..(1250239): n is a or c or g or t.
  misc_feature (1302432)..(1302434): n is a or c or g or t.
  misc_feature (1302471)..(1302471): n is a or c or g or t.
  misc_feature (1302488)..(1302488): n is a or c or g or t.
  misc_feature (1674836)..(1674836): n is a or c or g or t.
MQVVEKGETYDLSYAKKAMFVVVLLPLLVMYTEAMLTPALPTIQKEFAINPNDVSWVLTIYLLVGTVSVALFGKLGDMYGKKKMFLIALGFYTLGVILNGFAPSFQRLLVTRAIQGFGMAIFPLAFSLVREEFPPSMVPQVQGMISAMFAVGMVIALPLGAWVTENYGWRWTYHSAAPFAVLMFFLAWKILRESRYVNPGKVD

SEQ ID NO: 1314 - protein, 281 aa, Thermococcus kodakaraensis KOD1
  misc_feature (321437)..(321437): n is a or c or g or t.
  misc_feature (527833)..(527833): n is a or c or g or t.
  misc_feature (527901)..(527901): n is a or c or g or t.
  misc_feature (527978)..(527978): n is a or c or g or t.
  misc_feature (960838)..(960839): n is a or c or g or t.
  misc_feature (960860)..(960861): n is a or c or g or t.
  misc_feature (960872)..(960873): n is a or c or g or t.
  misc_feature (960879)..(960879): n is a or c or g or t.
  misc_feature (960890)..(960890): n is a or c or g or t.
  misc_feature (1250239)..(1250239): n is a or c or g or t.
  misc_feature (1302432)..(1302434): n is a or c or g or t.
  misc_feature (1302471)..(1302471): n is a or c or g or t.
  misc_feature (1302488)..(1302488): n is a or c or g or t.
  misc_feature (1674836)..(1674836): n is a or c or g or t.
VVPMLVAVTRAPNVGWTAKETLILFGVGVIGAVLLVLWERRVENPLLPLKIISSRNPAIANLGIMLAAFGLSMMSQANTYLLQMPEPYGFGKTILQSGLLMTPMALVMLIVAPLAGKFMPKIGAKPIAIAGALIGSGALAVMSLYATKMSLWQFVTMMTVVGIGINLMNISLINVLVFSVPPRMMGVATGSNSLFRNFGSTWGPAIAGTVMSTYYVLFHPPGAPAFVQIKIPTEKAYEVLFGGASVVYLLLALLAFAIVEVMKGGKIREVEEGGEKEIMVS

SEQ ID NO: 1315 - protein, 149 aa, Thermococcus kodakaraensis KOD1
  misc_feature (321437)..(321437): n is a or c or g or t.
  misc_feature (527833)..(527833): n is a or c or g or t.
  misc_feature (527901)..(527901): n is a or c or g or t.
  misc_feature (527978)..(527978): n is a or c or g or t.
  misc_feature (960838)..(960839): n is a or c or g or t.
  misc_feature (960860)..(960861): n is a or c or g or t.
  misc_feature (960872)..(960873): n is a or c or g or t.
  misc_feature (960879)..(960879): n is a or c or g or t.
  misc_feature (960890)..(960890): n is a or c or g or t.
  misc_feature (1250239)..(1250239): n is a or c or g or t.
  misc_feature (1302432)..(1302434): n is a or c or g or t.
  misc_feature (1302471)..(1302471): n is a or c or g or t.
  misc_feature (1302488)..(1302488): n is a or c or g or t.
  misc_feature (1674836)..(1674836): n is a or c or g or t.
VVEMAEDTKKLEELAYQYQLLQAQAQLLAQNLELLTLGRNEFQAVKETLEGLKNEEGEFEILVPIGAGSFLKGKIVDAKNAIVSVGAGYAVQKSLDDSIEYLEKRIKEYEEAIAKTQEALKKLEAQLGELARQAQEIQQKQAMGFSVKK

SEQ ID NO: 1316 - protein, 232 aa, Thermococcus kodakaraensis KOD1
  misc_feature (321437)..(321437): n is a or c or g or t.
  misc_feature (527833)..(527833): n is a or c or g or t.
  misc_feature (527901)..(527901): n is a or c or g or t.
  misc_feature (527978)..(527978): n is a or c or g or t.
  misc_feature (960838)..(960839): n is a or c or g or t.
  misc_feature (960860)..(960861): n is a or c or g or t.
  misc_feature (960872)..(960873): n is a or c or g or t.
  misc_feature (960879)..(960879): n is a or c or g or t.
  misc_feature (960890)..(960890): n is a or c or g or t.
  misc_feature (1250239)..(1250239): n is a or c or g or t.
  misc_feature (1302432)..(1302434): n is a or c or g or t.
  misc_feature (1302471)..(1302471): n is a or c or g or t.
  misc_feature (1302488)..(1302488): n is a or c or g or t.
  misc_feature (1674836)..(1674836): n is a or c or g or t.
MEWNVIRLDEVDSTNEYAKKLIPDVSEGTVVVAKRQTSGRGRKGRAWASPEGGLWMSVILKPPMIDPRLVFVGALAVSDTLRDFGIGAWIKWPNDVWVGNRKISGVLTEVKGDFVIMGVGLNVNNEIPDGLKETATSMMEALGEPVDIGEVLERLLEYLGRWYKTFLENPPLVVEEVRGRTMLIGKEVRVLLDGNDLVGRVITISDDGSLILDVDGQTVKVVYGDVSVRINR

SEQ ID NO: 1317 - protein, 430 aa, Thermococcus kodakaraensis KOD1 [sequence omitted]

SEQ ID NO: 1318 - protein, 470 aa, Thermococcus kodakaraensis KOD1
  misc_feature (321437)..(321437): n is a or c or g or t.
  misc_feature (527833)..(527833): n is a or c or g or t.
  misc_feature (527901)..(527901): n is a or c or g or t.
  misc_feature (527978)..(527978): n is a or c or g or t.
  misc_feature (960838)..(960839): n is a or c or g or t.
  misc_feature (960860)..(960861): n is a or c or g or t.
  misc_feature (960872)..(960873): n is a or c or g or t.
  misc_feature (960879)..(960879): n is a or c or g or t.
  misc_feature (960890)..(960890): n is a or c or g or t.
  misc_feature (1250239)..(1250239): n is a or c or g or t.
  misc_feature (1302432)..(1302434): n is a or c or g or t.
  misc_feature (1302471)..(1302471): n is a or c or g or t.
  misc_feature (1302488)..(1302488): n is a or c or g or t.
  misc_feature (1674836)..(1674836): n is a or c or g or t.
MGEILMKKVGVLLLIVLAFGAIAVPSFGADAYSEKVEQKYTVHWDGSADLKFITTLYGPSDMLNSTKEGILKVGLENATEMLVNQRVQLFSQLGMNLANASGTVKGYDSDGPLITEITGKVLDFAKYYSYDGIWEIELDVLRTLQISQVDLTSLNRTFDFEDHYSIVLPEDAEIVSIPSDYSRESGKSYVSINVDVHGNEIIVDARMHFDENITKDDLQKLYSDFQPFIIQYRGRPGQEGNYSVWSSKTETNITIGKEETVIDTLMEYIAPEDYVNYLKLMVMYQGEDAIIQSIYQNNLLAFQQQGISVKDWSIKFENVNSTAPLRLRFHWVLANYTKANNNTYVHDPSLGLRDVSVKGRLTDGINQTTTIRIILPEGSKFTQIPDDIHVEANGSQITMKVTKVSDKEVVLESSAYVRYGMLARDYFAMMEKVPERVEVKYNVEEKTGSTCGPAFLVGLAVVPLLLRRRK

SEQ ID NO: 1319 - protein, 226 aa, Thermococcus kodakaraensis KOD1
  misc_feature (321437)..(321437): n is a or c or g or t.
  misc_feature (527833)..(527833): n is a or c or g or t.
  misc_feature (527901)..(527901): n is a or c or g or t.
  misc_feature (527978)..(527978): n is a or c or g or t.
  misc_feature (960838)..(960839): n is a or c or g or t.
  misc_feature (960860)..(960861): n is a or c or g or t.
  misc_feature (960872)..(960873): n is a or c or g or t.
  misc_feature (960879)..(960879): n is a or c or g or t.
  misc_feature (960890)..(960890): n is a or c or g or t.
  misc_feature (1250239)..(1250239): n is a or c or g or t.
  misc_feature (1302432)..(1302434): n is a or c or g or t.
  misc_feature (1302471)..(1302471): n is a or c or g or t.
  misc_feature (1302488)..(1302488): n is a or c or g or t.
  misc_feature (1674836)..(1674836): n is a or c or g or t.
MATAYFPLVMRMATRKLYYEDAYLKEAKAKVLEVRDNALLLDQTIFYPTGGGQPHDRGTINGVEVLDVYKDEEGNVWHVVAEPEMFKVGDEVELKIDWDYRYKLMRIHSAMHLLDHVLNEVLGKGKWKPYGSGMSYEKGRYDIEYPENVNQYKEKIIELFNRYVDEGGEMKIWWEGETRLTQIRDFEVIPCGGTHVRDIKEIGHLKKLKRSSLGRGKQRLEIWLEE

SEQ ID NO: 1320 - protein, 21 aa, Thermococcus kodakaraensis KOD1
  misc_feature (321437)..(321437): n is a or c or g or t.
  misc_feature (527833)..(527833): n is a or c or g or t.
  misc_feature (527901)..(527901): n is a or c or g or t.
  misc_feature (527978)..(527978): n is a or c or g or t.
  misc_feature (960838)..(960839): n is a or c or g or t.
  misc_feature (960860)..(960861): n is a or c or g or t.
  misc_feature (960872)..(960873): n is a or c or g or t.
  misc_feature (960879)..(960879): n is a or c or g or t.
  misc_feature (960890)..(960890): n is a or c or g or t.
  misc_feature (1250239)..(1250239): n is a or c or g or t.
  misc_feature (1302432)..(1302434): n is a or c or g or t.
  misc_feature (1302471)..(1302471): n is a or c or g or t.
  misc_feature (1302488)..(1302488): n is a or c or g or t.
  misc_feature (1674836)..(1674836): n is a or c or g or t.
VGVEDCEGVTEVGGTVEAVAV

SEQ ID NO: 1321 - protein, 63 aa, Thermococcus kodakaraensis KOD1
  misc_feature (321437)..(321437): n is a or c or g or t.
  misc_feature (527833)..(527833): n is a or c or g or t.
  misc_feature (527901)..(527901): n is a or c or g or t.
  misc_feature (527978)..(527978): n is a or c or g or t.
  misc_feature (960838)..(960839): n is a or c or g or t.
  misc_feature (960860)..(960861): n is a or c or g or t.
  misc_feature (960872)..(960873): n is a or c or g or t.
  misc_feature (960879)..(960879): n is a or c or g or t.
  misc_feature (960890)..(960890): n is a or c or g or t.
  misc_feature (1250239)..(1250239): n is a or c or g or t.
  misc_feature (1302432)..(1302434): n is a or c or g or t.
  misc_feature (1302471)..(1302471): n is a or c or g or t.
  misc_feature (1302488)..(1302488): n is a or c or g or t.
  misc_feature (1674836)..(1674836): n is a or c or g or t.
MGAGTAPKGKRNRTPTHIRCRRCGRRAFNVKKGYCAACGFGRSRRMRKYSWSHKWRKKRNLSY

SEQ ID NO: 1322 - protein, 351 aa, Thermococcus kodakaraensis KOD1
  misc_feature (321437)..(321437): n is a or c or g or t.
  misc_feature (527833)..(527833): n is a or c or g or t.
  misc_feature (527901)..(527901): n is a or c or g or t.
  misc_feature (527978)..(527978): n is a or c or g or t.
  misc_feature (960838)..(960839): n is a or c or g or t.
  misc_feature (960860)..(960861): n is a or c or g or t.
  misc_feature (960872)..(960873): n is a or c or g or t.
  misc_feature (960879)..(960879): n is a or c or g or t.
  misc_feature (960890)..(960890): n is a or c or g or t.
  misc_feature (1250239)..(1250239): n is a or c or g or t.
  misc_feature (1302432)..(1302434): n is a or c or g or t.
  misc_feature (1302471)..(1302471): n is a or c or g or t.
  misc_feature (1302488)..(1302488): n is a or c or g or t.
  misc_feature (1674836)..(1674836): n is a or c or g or t.
VVEMRIERLKEFIAEKELDGVLITHKPNLFYFTGSAPVLGGYLVVTADEELFLVPQLEYEEARESSRVPVEYFKRGAELYERLKAFNLKKLGIEGRTSYSSVQSLKEKAGVEEFAVVDDVIKELRMVKTPEEIEVIKRACQIADKAMLVAIEEVREGVREREVAAKMEYVMKMEGAEKTAFDTIIASGWRSALPHGVASDKRIERGELVVIDEGALFNHYHSDMTRTVVVGSPNEKQREIYEIVLEAQKKGVEEARPGITAKELDTIVRDVIAEYGYGDYFIHSTGHGVGLEIHEWPGINQNDETVLKPGMVITVEPGIYLPKFGGVRIEDTIVITENGAERLTKTERELI

SEQ ID NO: 1323 - protein, 357 aa, Thermococcus kodakaraensis KOD1
  misc_feature (321437)..(321437): n is a or c or g or t.
  misc_feature (527833)..(527833): n is a or c or g or t.
  misc_feature (527901)..(527901): n is a or c or g or t.
  misc_feature (527978)..(527978): n is a or c or g or t.
  misc_feature (960838)..(960839): n is a or c or g or t.
  misc_feature (960860)..(960861): n is a or c or g or t.
  misc_feature (960872)..(960873): n is a or c or g or t.
  misc_feature (960879)..(960879): n is a or c or g or t.
  misc_feature (960890)..(960890): n is a or c or g or t.
  misc_feature (1250239)..(1250239): n is a or c or g or t.
  misc_feature (1302432)..(1302434): n is a or c or g or t.
  misc_feature (1302471)..(1302471): n is a or c or g or t.
  misc_feature (1302488)..(1302488): n is a or c or g or t.
  misc_feature (1674836)..(1674836): n is a or c or g or t.
MQILEEKPKEGKVKVKAETLDDLWHLYHIIDPGDIVYAKTLRKQAQRADSLRAEKVEVIPVFLGVQAEKINFHKFANQVRVTGPIVYASREDVPLGKYHTIAIEQGTVVTIQKPRWKEHHIERLKEAVAASKRARVMIVVIDDGEADMALVREYGVEILNSIRHNLGGKRYNTDRESEEMKFFHDVAKTMEEVMKRENVEKAIVAGPGFVKEDFYKFLKEKYPELAKKVVIEDTSVTGRTGIYEVIKRGVVDRVYQENRVAKEVQLVEKVLENIARNNGLVAYGLKEVEEAVNYGAVETLLVLDELLKGELREKVEELMDAVRYSRGEVVVVSSEHEGGEKLKALGGLAALLRFRVK

SEQ ID NO: 1324 - protein, 247 aa, Thermococcus kodakaraensis KOD1
  misc_feature (321437)..(321437): n is a or c or g or t.
  misc_feature (527833)..(527833): n is a or c or g or t.
  misc_feature (527901)..(527901): n is a or c or g or t.
  misc_feature (527978)..(527978): n is a or c or g or t.
  misc_feature (960838)..(960839): n is a or c or g or t.
  misc_feature (960860)..(960861): n is a or c or g or t.
  misc_feature (960872)..(960873): n is a or c or g or t.
  misc_feature (960879)..(960879): n is a or c or g or t.
  misc_feature (960890)..(960890): n is a or c or g or t.
  misc_feature (1250239)..(1250239): n is a or c or g or t.
  misc_feature (1302432)..(1302434): n is a or c or g or t.
  misc_feature (1302471)..(1302471): n is a or c or g or t.
  misc_feature (1302488)..(1302488): n is a or c or g or t.
  misc_feature (1674836)..(1674836): n is a or c or g or t.
MILAFIGTAGSGKTTLTGEFGKYLSENGYRVAYVNLDTGVRKLPYTPDLDVREKVTAWSLMDEGLGPNGAIVKSYDILAEYTGEYAEKIRELDKESDYVLIDTPGQMETFLFHEFGVELMEAFPDALGVYLFSPEVLRKPSDFCFAVFFGLMIDLRLGITTVPALNKVDTVEDIEGIRKYLDDIEYLTARLKLEPSTQGLLAYKLCSSLPELAPPTRVLYLSAKTGEGFEDLETVAYEHYCTCGDLT

SEQ ID NO: 1325 - protein, 474 aa, Thermococcus kodakaraensis KOD1
  misc_feature (321437)..(321437): n is a or c or g or t.
  misc_feature (527833)..(527833): n is a or c or g or t.
  misc_feature (527901)..(527901): n is a or c or g or t.
  misc_feature (527978)..(527978): n is a or c or g or t.
  misc_feature (960838)..(960839): n is a or c or g or t.
  misc_feature (960860)..(960861): n is a or c or g or t.
  misc_feature (960872)..(960873): n is a or c or g or t.
  misc_feature (960879)..(960879): n is a or c or g or t.
  misc_feature (960890)..(960890): n is a or c or g or t.
  misc_feature (1250239)..(1250239): n is a or c or g or t.
  misc_feature (1302432)..(1302434): n is a or c or g or t.
  misc_feature (1302471)..(1302471): n is a or c or g or t.
  misc_feature (1302488)..(1302488): n is a or c or g or t.
  misc_feature (1674836)..(1674836): n is a or c or g or t.
MSEKIVEELRPFFDPKAVAIIGATDKKGKVGNVIFENFRMNKERGIFKGNIYPVNPKLDEIEGYKVYHSVKELPDDTDLAVISIPAKFVPATMREVAEKGIKAVVIITGGFGELGEEGKRMEQEILEIARANGIRVIGPNCVGVYVPDTGVDTVFLPEEKMDRPKSGPIAFVSQSGAFAAAMLDWAAMAGIGIGKMVSYGNKLDVDDADLMEYFIHDDEIKVVTFYIEGVKDGRKFMEAAKKITKVKPVIALKSGRTEYGAKAASSHTGSLAGADTIYDAVFKQTGIIRAEDFEHMFDLAKAFAALLHKLPKGDRIGIITDGGGAGVMASDAVARFGLKMAELSEETIKFLEENFPPHAVAGNPTDVVGDTDAERYRIAIEAFTKDPNVDAIVIIVLFQVPLLEEEKIIEILADYQKKTDKPIVAVAMGGRKTDRYARMLEEKGVPVYPTPERGVRAMAGLVRYAEYLRKVKGE

SEQ ID NO: 1326 - protein, 139 aa, Thermococcus kodakaraensis KOD1
  misc_feature (321437)..(321437): n is a or c or g or t.
  misc_feature (527833)..(527833): n is a or c or g or t.
  misc_feature (527901)..(527901): n is a or c or g or t.
  misc_feature (527978)..(527978): n is a or c or g or t.
  misc_feature (960838)..(960839): n is a or c or g or t.
  misc_feature (960860)..(960861): n is a or c or g or t.
  misc_feature (960872)..(960873): n is a or c or g or t.
  misc_feature (960879)..(960879): n is a or c or g or t.
  misc_feature (960890)..(960890): n is a or c or g or t.
  misc_feature (1250239)..(1250239): n is a or c or g or t.
  misc_feature (1302432)..(1302434): n is a or c or g or t.
  misc_feature (1302471)..(1302471): n is a or c or g or t.
  misc_feature (1302488)..(1302488): n is a or c or g or t.
  misc_feature (1674836)..(1674836): n is a or c or g or t.
VITMKYKLDKGAHSVYSLYYHLILVVKHRRKVFTNDRIIDFLKQKIHEISETHEVEVLTIETDQDHVHILFKAKPTLNIPKYINALKTITSREIRRNFPEVKEKLWRNTFWSPSYFLATSGQVTLDVLKAYVESQGEGS

SEQ ID NO: 1327 - protein, 206 aa, Thermococcus kodakaraensis KOD1
  misc_feature (321437)..(321437): n is a or c or g or t.
  misc_feature (527833)..(527833): n is a or c or g or t.
  misc_feature (527901)..(527901): n is a or c or g or t.
  misc_feature (527978)..(527978): n is a or c or g or t.
  misc_feature (960838)..(960839): n is a or c or g or t.
  misc_feature (960860)..(960861): n is a or c or g or t.
  misc_feature (960872)..(960873): n is a or c or g or t.
  misc_feature (960879)..(960879): n is a or c or g or t.
  misc_feature (960890)..(960890): n is a or c or g or t.
  misc_feature (1250239)..(1250239): n is a or c or g or t.
  misc_feature (1302432)..(1302434): n is a or c or g or t.
  misc_feature (1302471)..(1302471): n is a or c or g or t.
  misc_feature (1302488)..(1302488): n is a or c or g or t.
  misc_feature (1674836)..(1674836): n is a or c or g or t.
MELKEIIDGIRRTLDEADSAREEALRLTREVVRLSGDAVKAIHRNDLETARQRLKSAQQLVEMIRESLKPYPMLYYSGYVQSAHQEFVEATLLLAYREGREFPSPWDLGVPEADYLLGLGDFVGELRRHFLLLLIDGKVEEAEEVYRFMEELYGELMTLEYPKGLVNIRTKQDQARHILERTLEDLTRAKLNKRLEEKLKAAVGDE

SEQ ID NO: 1328 - protein, 174 aa, Thermococcus kodakaraensis KOD1
  misc_feature (321437)..(321437): n is a or c or g or t.
  misc_feature (527833)..(527833): n is a or c or g or t.
  misc_feature (527901)..(527901): n is a or c or g or t.
  misc_feature (527978)..(527978): n is a or c or g or t.
  misc_feature (960838)..(960839): n is a or c or g or t.
  misc_feature (960860)..(960861): n is a or c or g or t.
  misc_feature (960872)..(960873): n is a or c or g or t.
  misc_feature (960879)..(960879): n is a or c or g or t.
  misc_feature (960890)..(960890): n is a or c or g or t.
  misc_feature (1250239)..(1250239): n is a or c or g or t.
  misc_feature (1302432)..(1302434): n is a or c or g or t.
  misc_feature (1302471)..(1302471): n is a or c or g or t.
  misc_feature (1302488)..(1302488): n is a or c or g or t.
  misc_feature (1674836)..(1674836): n is a or c or g or t.
MLGLKLLYPPPQLVLVKTVKVEGFVAALREAETIGELFKILQEKGAPVLELDGGKFLIVVEGDFEGRPFWTEINGEKANQALGDAMLNSSSFPFKCKKPYTGGNVIFVNFDDIEVEKFLVAYRDPDYGIFYLVENGEAREITKEEYEKLLPEMPEFKVKGMSEEQMDMMGAFFG

SEQ ID NO: 1329 - protein, 223 aa, Thermococcus kodakaraensis KOD1
  misc_feature (321437)..(321437): n is a or c or g or t.
  misc_feature (527833)..(527833): n is a or c or g or t.
  misc_feature (527901)..(527901): n is a or c or g or t.
  misc_feature (527978)..(527978): n is a or c or g or t.
  misc_feature (960838)..(960839): n is a or c or g or t.
  misc_feature (960860)..(960861): n is a or c or g or t.
  misc_feature (960872)..(960873): n is a or c or g or t.
  misc_feature (960879)..(960879): n is a or c or g or t.
  misc_feature (960890)..(960890): n is a or c or g or t.
  misc_feature (1250239)..(1250239): n is a or c or g or t.
  misc_feature (1302432)..(1302434): n is a or c or g or t.
  misc_feature (1302471)..(1302471): n is a or c or g or t.
  misc_feature (1302488)..(1302488): n is a or c or g or t.
  misc_feature (1674836)..(1674836): n is a or c or g or t.
VEVNVDWDVLKTILSEPKKTLLFFPYFKEFDGQKVRFEVPRFIFNFGYEFELDVGFGNSEAIYTFRGERGILTVTFKVQNGRLKVTADWAGFGEALMGKPLEIFASGIAEAVQEFCTSLKCPVVKVSEEGGEVTRITPDSAPALLKRLALEFGTSFMVEGTADDGTYLAAKVVNGKLVELRLKQGTRESVISTDVSVVELDEGLFEDLPLDRSFKIKVRELTP

SEQ ID NO: 1330 - protein, 168 aa, Thermococcus kodakaraensis KOD1
  misc_feature (321437)..(321437): n is a or c or g or t.
  misc_feature (527833)..(527833): n is a or c or g or t.
  misc_feature (527901)..(527901): n is a or c or g or t.
  misc_feature (527978)..(527978): n is a or c or g or t.
  misc_feature (960838)..(960839): n is a or c or g or t.
  misc_feature (960860)..(960861): n is a or c or g or t.
  misc_feature (960872)..(960873): n is a or c or g or t.
  misc_feature (960879)..(960879): n is a or c or g or t.
  misc_feature (960890)..(960890): n is a or c or g or t.
  misc_feature (1250239)..(1250239): n is a or c or g or t.
  misc_feature (1302432)..(1302434): n is a or c or g or t.
  misc_feature (1302471)..(1302471): n is a or c or g or t.
  misc_feature (1302488)..(1302488): n is a or c or g or t.
  misc_feature (1674836)..(1674836): n is a or c or g or t.
VVPYLLTLKTTIGLSPHWENLEALKTLATAMGKEMLTFDMKEGSDALAEFIGSIGVDYLIAGDVYLEDHLRWVKLLAEKAGIKPLEPLWGRNTRELAEEMLEAGFKWAIIAVNKEKLGREWLGYIFRSVEDLEKFLEANPSVTPSGKQGSFTRSFWKLPSLKKGSASK

SEQ ID NO: 1331 - protein, 145 aa, Thermococcus kodakaraensis KOD1
  misc_feature (321437)..(321437): n is a or c or g or t.
  misc_feature (527833)..(527833): n is a or c or g or t.
  misc_feature (527901)..(527901): n is a or c or g or t.
  misc_feature (527978)..(527978): n is a or c or g or t.
  misc_feature (960838)..(960839): n is a or c or g or t.
  misc_feature (960860)..(960861): n is a or c or g or t.
  misc_feature (960872)..(960873): n is a or c or g or t.
  misc_feature (960879)..(960879): n is a or c or g or t.
  misc_feature (960890)..(960890): n is a or c or g or t.
  misc_feature (1250239)..(1250239): n is a or c or g or t.
  misc_feature (1302432)..(1302434): n is a or c or g or t.
  misc_feature (1302471)..(1302471): n is a or c or g or t.
  misc_feature (1302488)..(1302488): n is a or c or g or t.
  misc_feature (1674836)..(1674836): n is a or c or g or t.
MELVLDFNVIFSALHGRGVAYRIFMENHVLERFRFLIPAYLWEELDSKRERISRLTHLSEDEVAYVLSIIRRQTVVIPENIVLQGMEKAREICPDPKDIPYVALALALNVPLLTGDKKLAKSVGGYIKVYTPREVLNFLEGRSEL

SEQ ID NO: 1332 - protein, 195 aa, Thermococcus kodakaraensis KOD1
  misc_feature (321437)..(321437): n is a or c or g or t.
  misc_feature (527833)..(527833): n is a or c or g or t.
  misc_feature (527901)..(527901): n is a or c or g or t.
  misc_feature (527978)..(527978): n is a or c or g or t.
  misc_feature (960838)..(960839): n is a or c or g or t.
  misc_feature (960860)..(960861): n is a or c or g or t.
  misc_feature (960872)..(960873): n is a or c or g or t.
  misc_feature (960879)..(960879): n is a or c or g or t.
  misc_feature (960890)..(960890): n is a or c or g or t.
  misc_feature (1250239)..(1250239): n is a or c or g or t.
  misc_feature (1302432)..(1302434): n is a or c or g or t.
  misc_feature (1302471)..(1302471): n is a or c or g or t.
  misc_feature (1302488)..(1302488): n is a or c or g or t.
  misc_feature (1674836)..(1674836): n is a or c or g or t.
VVVSVIIILAGGKSTRMGKEKPVLKIAGKEMLLWVYASASRVDETIVALSKNTPKTRELCLREGIPFMETPGKGYVEDVQWLLNEFGPFISSSSDIPFVKPSDFYAVKKAFNGKTSLTGVLPIQKVPKDLKPLVYRGYAIVGLNAVGFEGEGFFELENPLLALNVNTPEDLKLAERIARLVRKVIFGWEDLTTGR

SEQ ID NO: 1333 - protein, 338 aa, Thermococcus kodakaraensis KOD1
  misc_feature (321437)..(321437): n is a or c or g or t.
  misc_feature (527833)..(527833): n is a or c or g or t.
  misc_feature (527901)..(527901): n is a or c or g or t.
  misc_feature (527978)..(527978): n is a or c or g or t.
  misc_feature (960838)..(960839): n is a or c or g or t.
  misc_feature (960860)..(960861): n is a or c or g or t.
  misc_feature (960872)..(960873): n is a or c or g or t.
  misc_feature (960879)..(960879): n is a or c or g or t.
  misc_feature (960890)..(960890): n is a or c or g or t.
  misc_feature (1250239)..(1250239): n is a or c or g or t.
  misc_feature (1302432)..(1302434): n is a or c or g or t.
  misc_feature (1302471)..(1302471): n is a or c or g or t.
  misc_feature (1302488)..(1302488): n is a or c or g or t.
  misc_feature (1674836)..(1674836): n is a or c or g or t.
VVEVKSIFILVLGNTEVSLIPGISVAGATPELTKLTPPADAEYLFYEKPRIIDAIPVTPEGHPTPAIITKAARELANFPILVVRGGTYLAPLVPHVHISSAVGRDFRREPALPEFGEIVRMAKLLGEELNRTEIEELVIGESTPGGTTTAQAVLWAMGYDARTSSASPENPQSLKEQVIAEGFQRAGIERGQLKDNPLEALRQFGDPMMATVVGLALGFRKNVVLAGGTQMLAVSALLKALEEDMSRFMIATTKWVVRDKSATFIETAKEIGIITYAADLDFSKSEFKGLRDYENGYVKEGVGAGGATWLAIKAGFSPEEVSAKVEELYRRLMGMKSP

SEQ ID NO: 1334 - protein, 278 aa, Thermococcus kodakaraensis KOD1
  misc_feature (321437)..(321437): n is a or c or g or t.
  misc_feature (527833)..(527833): n is a or c or g or t.
  misc_feature (527901)..(527901): n is a or c or g or t.
  misc_feature (527978)..(527978): n is a or c or g or t.
  misc_feature (960838)..(960839): n is a or c or g or t.
  misc_feature (960860)..(960861): n is a or c or g or t.
  misc_feature (960872)..(960873): n is a or c or g or t.
  misc_feature (960879)..(960879): n is a or c or g or t.
  misc_feature (960890)..(960890): n is a or c or g or t.
  misc_feature (1250239)..(1250239): n is a or c or g or t.
  misc_feature (1302432)..(1302434): n is a or c or g or t.
  misc_feature (1302471)..(1302471): n is a or c or g or t.
  misc_feature (1302488)..(1302488): n is a or c or g or t.
  misc_feature (1674836)..(1674836): n is a or c or g or t.
MKKVRIFNDLKWIGDDKVTAIGMGTWGIGGYESPDYSKDNESVEVLRHGLELGINLIDTAEFYGAGHSEELVGEAIKEFERDDIFIISKVWPTHFGYEEAKRAARASAKRLGTYIDLYLLHWPGDSWEKIKETLHALEELVDEGLIRYIGVSNFDLELLKRSQEAMKKYEIVANEVKYSLKDRWPETTGLLDYMKREGIALIAYTPLEKGTLARNECLAEIGKKYGKTAAQVALNYLIWEENVIAIPKAGNKAHLEENFGAMGWRLSKEDRENARGCV

SEQ ID NO: 1335 - protein, 234 aa, Thermococcus kodakaraensis KOD1
  misc_feature (321437)..(321437): n is a or c or g or t.
  misc_feature (527833)..(527833): n is a or c or g or t.
  misc_feature (527901)..(527901): n is a or c or g or t.
  misc_feature (527978)..(527978): n is a or c or g or t.
  misc_feature (960838)..(960839): n is a or c or g or t.
  misc_feature (960860)..(960861): n is a or c or g or t.
  misc_feature (960872)..(960873): n is a or c or g or t.
  misc_feature (960879)..(960879): n is a or c or g or t.
  misc_feature (960890)..(960890): n is a or c or g or t.
  misc_feature (1250239)..(1250239): n is a or c or g or t.
  misc_feature (1302432)..(1302434): n is a or c or g or t.
  misc_feature (1302471)..(1302471): n is a or c or g or t.
  misc_feature (1302488)..(1302488): n is a or c or g or t.
  misc_feature (1674836)..(1674836): n is a or c or g or t.
MLKKCRGVSLHSIKFERQFLTTVERVKGKYFYECARTPIGGFMKIDDLDLKLIYLLMDDARLSISELAERLGVSRPTVRARLEKLEKEGVIQGYTIKLNPELQRAHNVVALVVKTENPEKMDGFEEIIEVNRFTSTKYLIKVAVENMEDLKRVIEGTGVEVIEIMPILESKEKPPRPKIKVSYKCDYCGKEIVGEPIVYKYRNKVYFFCCPTCLREFKKTRENLEKAMAGEEKE

SEQ ID NO: 1336 - protein, 390 aa, Thermococcus kodakaraensis KOD1
  misc_feature (321437)..(321437): n is a or c or g or t.
  misc_feature (527833)..(527833): n is a or c or g or t.
  misc_feature (527901)..(527901): n is a or c or g or t.
  misc_feature (527978)..(527978): n is a or c or g or t.
  misc_feature (960838)..(960839): n is a or c or g or t.
  misc_feature (960860)..(960861): n is a or c or g or t.
  misc_feature (960872)..(960873): n is a or c or g or t.
  misc_feature (960879)..(960879): n is a or c or g or t.
  misc_feature (960890)..(960890): n is a or c or g or t.
  misc_feature (1250239)..(1250239): n is a or c or g or t.
  misc_feature (1302432)..(1302434): n is a or c or g or t.
  misc_feature (1302471)..(1302471): n is a or c or g or t.
  misc_feature (1302488)..(1302488): n is a or c or g or t.
  misc_feature (1674836)..(1674836): n is a or c or g or t.
MLSGYGRDAKILIAANAVGQLFLQFSIFIMPFYLRALGYGMDSMGLFFSVQTFIGGLFFLIAGQISLRLGYRKTLLMGAVLGLLGRLFQVLALNKYFLLLGFFLVGVNMGIRQPNFSALLSEEVGEKLRHHAFSISFGLGTIFNAIGVLIAGFAPDFLTETFGLIPEIAYRLVISLALLQFALVIPALLVIHDVPVKNPRINWNRELVIKILKFSLPSALIGLGAGITIPYMSLYFNIRFGQTLAAISGVFFFQQLVMGLGSFGLPKLVEKIGPVNVITSFQLVAALLFATFPLIDVFLLAAFLYIVRSILMNIVWPINDSFMMGFFTTEEKATAAGIRRAFSTFMRGAGNYIGGVLFSISLSYPFYATATLYVVATLIFYGFFARYNRA

SEQ ID NO: 1337 - protein, 45 aa, Thermococcus kodakaraensis KOD1
  misc_feature (321437)..(321437): n is a or c or g or t.
  misc_feature (527833)..(527833): n is a or c or g or t.
  misc_feature (527901)..(527901): n is a or c or g or t.
  misc_feature (527978)..(527978): n is a or c or g or t.
  misc_feature (960838)..(960839): n is a or c or g or t.
  misc_feature (960860)..(960861): n is a or c or g or t.
  misc_feature (960872)..(960873): n is a or c or g or t.
  misc_feature (960879)..(960879): n is a or c or g or t.
  misc_feature (960890)..(960890): n is a or c or g or t.
  misc_feature (1250239)..(1250239): n is a or c or g or t.
  misc_feature (1302432)..(1302434): n is a or c or g or t.
  misc_feature (1302471)..(1302471): n is a or c or g or t.
  misc_feature (1302488)..(1302488): n is a or c or g or t.
  misc_feature (1674836)..(1674836): n is a or c or g or t.
MSVELVFKVLKEAGRPLKSAEIAELAGLDKKEVGRAIKKLKKKGR

SEQ ID NO: 1338 - protein, 294 aa, Thermococcus kodakaraensis KOD1
  misc_feature (321437)..(321437): n is a or c or g or t.
  misc_feature (527833)..(527833): n is a or c or g or t.
  misc_feature (527901)..(527901): n is a or c or g or t.
  misc_feature (527978)..(527978): n is a or c or g or t.
  misc_feature (960838)..(960839): n is a or c or g or t.
  misc_feature (960860)..(960861): n is a or c or g or t.
  misc_feature (960872)..(960873): n is a or c or g or t.
  misc_feature (960879)..(960879): n is a or c or g or t.
  misc_feature (960890)..(960890): n is a or c or g or t.
  misc_feature (1250239)..(1250239): n is a or c or g or t.
  misc_feature (1302432)..(1302434): n is a or c or g or t.
  misc_feature (1302471)..(1302471): n is a or c or g or t.
  misc_feature (1302488)..(1302488): n is a or c or g or t.
  misc_feature (1674836)..(1674836): n is a or c or g or t.
MNVQLPTGRELFEPKRPGSQDIAWCPGCGNFGIRNILISALAELGLKPNQVAIISGIGQAAKMPHYINVNGYHTLHGRAIPIATGVKASNPELTVIAEGGDGDMYAEGGNHLLHAIRRNPDITVLIHDNQVYGLTKGQASPTTMKGMKTPTQPWGVFEEPFNPLALAIALDASFVARTFMGYFKESVEIIKKAIQHKGLTIVDILHPCVSFNKVNTYAWYREHTYWMDDHDPYDREAAFRRALESDPLPLGIFYIHEKPTFEEQVPAYKKDKTPLWKREPKPELVKKFFEGKKL

SEQ ID NO: 1339 - protein, 148 aa, Thermococcus kodakaraensis KOD1
  misc_feature (321437)..(321437): n is a or c or g or t.
  misc_feature (527833)..(527833): n is a or c or g or t.
  misc_feature (527901)..(527901): n is a or c or g or t.
  misc_feature (527978)..(527978): n is a or c or g or t.
  misc_feature (960838)..(960839): n is a or c or g or t.
  misc_feature (960860)..(960861): n is a or c or g or t.
  misc_feature (960872)..(960873): n is a or c or g or t.
  misc_feature (960879)..(960879): n is a or c or g or t.
  misc_feature (960890)..(960890): n is a or c or g or t.
  misc_feature (1250239)..(1250239): n is a or c or g or t.
  misc_feature (1302432)..(1302434): n is a or c or g or t.
  misc_feature (1302471)..(1302471): n is a or c or g or t.
  misc_feature (1302488)..(1302488): n is a or c or g or t.
  misc_feature (1674836)..(1674836): n is a or c or g or t.
VKVGETALDFVLKDQDGKEFRLSDFRGKRVLLSFHPLAWTGICEKQMKALEENYERFEELNVVPVGISVDPVPSKKAWAEHMGLKRLRILSDFWPHGAVSKLYGIFREDGGFSERANVLVDEEGRVVFFKVYPISELPDLEEIFEVLH

SEQ ID NO: 1340 - protein, 470 aa, Thermococcus kodakaraensis KOD1
  misc_feature (321437)..(321437): n is a or c or g or t.
  misc_feature (527833)..(527833): n is a or c or g or t.
  misc_feature (527901)..(527901): n is a or c or g or t.
  misc_feature (527978)..(527978): n is a or c or g or t.
  misc_feature (960838)..(960839): n is a or c or g or t.
  misc_feature (960860)..(960861): n is a or c or g or t.
  misc_feature (960872)..(960873): n is a or c or g or t.
  misc_feature (960879)..(960879): n is a or c or g or t.
  misc_feature (960890)..(960890): n is a or c or g or t.
  misc_feature (1250239)..(1250239): n is a or c or g or t.
  misc_feature (1302432)..(1302434): n is a or c or g or t.
  misc_feature (1302471)..(1302471): n is a or c or g or t.
  misc_feature (1302488)..(1302488): n is a or c or g or t.
  misc_feature (1674836)..(1674836): n is a or c or g or t.
MEREKIIRAVFVAVVALTMIGTIWYSYSFASRPDLNDYIGDEVWYVPASRNILHRLGVDVFYIHNGSYGVNVVFSNTSAKIKNLAMTDWVAGINDARYRMEYREFPGVYYEIPAENYEDFLQRLKSDLPDGSYDVIPGFRYPDKENIQNYLNTEHPFMGKDIIMLSMLLLGDRPIAWRIPGIIAFALIELAVVLATYRISKSYLASLIALLFVAADPTLQATAVTAMLDIHVAFFVALFVLAIVYERKLSSAVLLGLAGATKLSGAFGWPVLLWKSLKSENSFVRFFSAVVVIPGIAFLVPELPAIKAMGFERWLNEFLGSFKWHLSYKGANPNTSPFWEWFINYRPFPFHFNPNVFASTDPVLLMGMVVMILALPWVYRKKPGVSEPFFIFWSTVGLFALQYFLGGKTQFSFYATVLVPPAAVSMGVFLNEVIRWEAFRESLALYKIKVLAAASFAWKKLRPSESSGQE

SEQ ID NO: 1341 - protein, 258 aa, Thermococcus kodakaraensis KOD1
  misc_feature (321437)..(321437): n is a or c or g or t.
  misc_feature (527833)..(527833): n is a or c or g or t.
  misc_feature (527901)..(527901): n is a or c or g or t.
  misc_feature (527978)..(527978): n is a or c or g or t.
  misc_feature (960838)..(960839): n is a or c or g or t.
  misc_feature (960860)..(960861): n is a or c or g or t.
  misc_feature (960872)..(960873): n is a or c or g or t.
  misc_feature (960879)..(960879): n is a or c or g or t.
  misc_feature (960890)..(960890): n is a or c or g or t.
  misc_feature (1250239)..(1250239): n is a or c or g or t.
  misc_feature (1302432)..(1302434): n is a or c or g or t.
  misc_feature (1302471)..(1302471): n is a or c or g or t.
  misc_feature (1302488)..(1302488): n is a or c or g or t.
  misc_feature (1674836)..(1674836): n is a or c or g or t.
MREEFLDREIEEMLGLRERREKDSELYKIANEVFDRTTKETLAYLHRRGKIETLYGVISTGKEANVFAGIDSEGKRIAVKIYRTYTTEFRRIWEYLAADPRIGYLPKDMRKLVFVWTRREFKNLQRAIKYAVRVPEPVIFRNNVLVMEFVGDETPAPRLKDVEKELSKEDFEGLYDFTMGVIERLWKRGDMVHGDLSEYNILLHDGPVVIDWSQATVRRNRMSLELLRRDITNVSNYFRKKGVDVEDPEGKFRELVEG

SEQ ID NO: 1342 - protein, 569 aa, Thermococcus kodakaraensis KOD1
  misc_feature (321437)..(321437): n is a or c or g or t.
  misc_feature (527833)..(527833): n is a or c or g or t.
  misc_feature (527901)..(527901): n is a or c or g or t.
  misc_feature (527978)..(527978): n is a or c or g or t.
  misc_feature (960838)..(960839): n is a or c or g or t.
  misc_feature (960860)..(960861): n is a or c or g or t.
  misc_feature (960872)..(960873): n is a or c or g or t.
  misc_feature (960879)..(960879): n is a or c or g or t.
  misc_feature (960890)..(960890): n is a or c or g or t.
  misc_feature (1250239)..(1250239): n is a or c or g or t.
  misc_feature (1302432)..(1302434): n is a or c or g or t.
  misc_feature (1302471)..(1302471): n is a or c or g or t.
  misc_feature (1302488)..(1302488): n is a or c or g or t.
  misc_feature (1674836)..(1674836): n is a or c or g or t.
VIMAEANQLFKEFKIQSVSEFFRRNAAMLGYTGKVRSLTTLVHEAVTNSLDACEEAGIPPYVRVEIEELGNEHYKVVVEDNGPGIPEKYITHVFGKMLAGTKAHRNIQSRGQQGIGISGAVMFAQITSGKATRVITSTGNDEIIEAWVKIDVDKNEGKIVKKEKHPNPKGWRGTRIELEVKNVKYMRSKQGVFWYLKLTAIANPHAHIELIEPDGKLIVFPRSSDYIPEPPVEMKPHPKGVLTDDVYRLAKKTRRNTVRRFLIGEFSRISDKKVDELIEYIAALRLIKTVEDKKLQEQYYQKLMEGHVKAVLRAFKGYTKVVKQVAKMMEKPPEKLTWHEAEEIVEAFKYMKFLAPPTHGLRPIGEENIEKGLKGILKPEFVTAVTRPPKVYSGGIPFQVEVGIAYGGEIPAGFDLYRYANRVPLLFDAGSCVTTQAARSIDWKRYKIDDLDRAPLVLMINVVSVHVPYTGTGKQSIASVDEIYNEIRLAIMDAARRLQTYLSGKHRKLAQVKRRKTFEKYVPEIARALSILTGEPEEKIREYFIRFIESKFASAEVEEVAAEEVAENA

SEQ ID NO: 1343 - protein, 414 aa, Thermococcus kodakaraensis KOD1
  misc_feature (321437)..(321437): n is a or c or g or t.
  misc_feature (527833)..(527833): n is a or c or g or t.
  misc_feature (527901)..(527901): n is a or c or g or t.
  misc_feature (527978)..(527978): n is a or c or g or t.
  misc_feature (960838)..(960839): n is a or c or g or t.
  misc_feature (960860)..(960861): n is a or c or g or t.
  misc_feature (960872)..(960873): n is a or c or g or t.
  misc_feature (960879)..(960879): n is a or c or g or t.
  misc_feature (960890)..(960890): n is a or c or g or t.
  misc_feature (1250239)..(1250239): n is a or c or g or t.
  misc_feature (1302432)..(1302434): n is a or c or g or t.
  misc_feature (1302471)..(1302471): n is a or c or g or t.
  misc_feature (1302488)..(1302488): n is a or c or g or t.
  misc_feature (1674836)..(1674836): n is a or c or g or t.
MTTTEELVAQVNKILDDIGIDLGELFQDFDPVRLALTLNRNLSLLEELEEELERRVGEGGPSVPMGDRKNRDPHLQWLYRKRHYRTLALERLRSAITAHKIALAILDANYTFKRGSSEIKATEIKDEKVKATRKPYSIGRVEILPYLAYSGDVLKLLARESLSVRDAFKEIKGRLREQGMVKTRSIRLEVEYFENNRLKKAHVSLPADADIEAELRKQFGRRFRWRVLSLVKTRGVLINNHYTVDNLALAYASFNPEKGAELLGLDIFRYYFLTSPADRETLGVFPGIKSCLDCHYSILDLPFRWDPNFKTGQGSLYIIRKCEMEEQLVGRKKDLSGVPNYLLGGVLLYGISNYDEKKVAEILGIPEDELTEAMKKFVISGLANVLFTKEEAKKFDKFMPKSDKAKQFLALLQG

SEQ ID NO: 1344 - protein, 477 aa, Thermococcus kodakaraensis KOD1
  misc_feature (321437)..(321437): n is a or c or g or t.
  misc_feature (527833)..(527833): n is a or c or g or t.
  misc_feature (527901)..(527901): n is a or c or g or t.
  misc_feature (527978)..(527978): n is a or c or g or t.
  misc_feature (960838)..(960839): n is a or c or g or t.
  misc_feature (960860)..(960861): n is a or c or g or t.
  misc_feature (960872)..(960873): n is a or c or g or t.
  misc_feature (960879)..(960879): n is a or c or g or t.
  misc_feature (960890)..(960890): n is a or c or g or t.
  misc_feature (1250239)..(1250239): n is a or c or g or t.
  misc_feature (1302432)..(1302434): n is a or c or g or t.
  misc_feature (1302471)..(1302471): n is a or c or g or t.
  misc_feature (1302488)..(1302488): n is a or c or g or t.
  misc_feature (1674836)..(1674836): n is a or c or g or t.
MMDFRVVTLYEFENRPLSELKKLGLQTGERELMKFAEAVNSLYGGDSPVFTVTYDPRRDEYHLKTHGSVGFAYYLGDDGIVLVQVLPKPFRYDREDGRSLLFFLQLFNMYYQMGLEPGEIRALVFEYGRQKALDEIFKYLYVLMLSRALSRGLYYEYGEIEESSQTVRGRILVNELARRPAWKADLPVRYSLLLEDNPLNRVLKGALEVAVKSARLSETRKVGGILLDLFRDVGDPKPGDFGKVSFNHLNERFRTVFRLARVMYFGLAAGGSRKFLPGVFIRMDELFETLVYRTLKTVLDNEAEVRFQVQLPHVIKNAGEIEARFGALFMMGNPLPDIVVSTDEGTCVVEVKYRNLYVYHRGENRAHRKLVRKSDELYQAYTYSRLVSEYLGAKRVPVLLVYPRLEGIYNHWIPNLFSARPEDTFEFFDGTRVGVFGYELSMIGDEILLRKNSVVIDEDTAENLKSFILGLCSSGEV

SEQ ID NO: 1345 - protein, 267 aa, Thermococcus kodakaraensis KOD1
  misc_feature (321437)..(321437): n is a or c or g or t.
  misc_feature (527833)..(527833): n is a or c or g or t.
  misc_feature (527901)..(527901): n is a or c or g or t.
  misc_feature (527978)..(527978): n is a or c or g or t.
  misc_feature (960838)..(960839): n is a or c or g or t.
  misc_feature (960860)..(960861): n is a or c or g or t.
  misc_feature (960872)..(960873): n is a or c or g or t.
  misc_feature (960879)..(960879): n is a or c or g or t.
  misc_feature (960890)..(960890): n is a or c or g or t.
  misc_feature (1250239)..(1250239): n is a or c or g or t.
  misc_feature (1302432)..(1302434): n is a or c or g or t.
  misc_feature (1302471)..(1302471): n is a or c or g or t.
  misc_feature (1302488)..(1302488): n is a or c or g or t.
  misc_feature (1674836)..(1674836): n is a or c or g or t.
MFVETQEEVPEIREPLRRVGITNLRTVAKINWKGREYTFLPLIEVTIDVPAEKKGIHMSRLVESITEAMSEAVEEEVAKVHSSLEELGKSVIERLEGKHPHKRAEVWIKTHLIIPRTTPASKKTSYEPYDVEVGVIKNEDGSFEKVLRVRVIGNTACPHAMANNNGKTHIQRAIGELEIRAPFEEEIPLEEMIDVVESSFSHPTYTLLKTVDENAVVQGMFANPKFVEDVAREIFAKAKERFRGRIHVRVISNESIHKHDVIAETWS

SEQ ID NO: 1346 - protein, 65 aa, Thermococcus kodakaraensis KOD1
  misc_feature (321437)..(321437): n is a or c or g or t.
  misc_feature (527833)..(527833): n is a or c or g or t.
  misc_feature (527901)..(527901): n is a or c or g or t.
  misc_feature (527978)..(527978): n is a or c or g or t.
  misc_feature (960838)..(960839): n is a or c or g or t.
  misc_feature (960860)..(960861): n is a or c or g or t.
  misc_feature (960872)..(960873): n is a or c or g or t.
  misc_feature (960879)..(960879): n is a or c or g or t.
  misc_feature (960890)..(960890): n is a or c or g or t.
  misc_feature (1250239)..(1250239): n is a or c or g or t.
  misc_feature (1302432)..(1302434): n is a or c or g or t.
  misc_feature (1302471)..(1302471): n is a or c or g or t.
  misc_feature (1302488)..(1302488): n is a or c or g or t.
  misc_feature (1674836)..(1674836): n is a or c or g or t.
VVRTVSVTLVEIQRKIDEIEKFLKELIEVNLQLIEESEPEEWEIKEIQKRRKDEFMEWDVVKDEL

SEQ ID NO: 1347 - protein, 256 aa, Thermococcus kodakaraensis KOD1
  misc_feature (321437)..(321437): n is a or c or g or t.
  misc_feature (527833)..(527833): n is a or c or g or t.
  misc_feature (527901)..(527901): n is a or c or g or t.
  misc_feature (527978)..(527978): n is a or c or g or t.
  misc_feature (960838)..(960839): n is a or c or g or t.
  misc_feature (960860)..(960861): n is a or c or g or t.
  misc_feature (960872)..(960873): n is a or c or g or t.
  misc_feature (960879)..(960879): n is a or c or g or t.
  misc_feature (960890)..(960890): n is a or c or g or t.
  misc_feature (1250239)..(1250239): n is a or c or g or t.
  misc_feature (1302432)..(1302434): n is a or c or g or t.
  misc_feature (1302471)..(1302471): n is a or c or g or t.
  misc_feature (1302488)..(1302488): n is a or c or g or t.
  misc_feature (1674836)..(1674836): n is a or c or g or t.
MEFNWSEIALNTAKELEEKIMPLFGTKKAGENVGTNVSGDVTKYVDKVAEDIILKRLVPLGVNVVSEEVGTVDSGSDYTVVVDPLDGSYNFSAGIPIFAFSLGIFKGKKPVYGAIYEFLPENFYEAKPGKGAYLNGERIRVNEPEPGKEALSFYTRGRCLGLVKKVKRVRVLGAIAVELAYVARGSLDGVFDIRNYVRPTDVAAGVLLVREAGGIVTDERGREFEVKLSATEKTNIIAVANERLLNTILEAMKDEP

SEQ ID NO: 1348 - protein, 282 aa, Thermococcus kodakaraensis KOD1
  misc_feature (321437)..(321437): n is a or c or g or t.
  misc_feature (527833)..(527833): n is a or c or g or t.
  misc_feature (527901)..(527901): n is a or c or g or t.
  misc_feature (527978)..(527978): n is a or c or g or t.
  misc_feature (960838)..(960839): n is a or c or g or t.
  misc_feature (960860)..(960861): n is a or c or g or t.
  misc_feature (960872)..(960873): n is a or c or g or t.
  misc_feature (960879)..(960879): n is a or c or g or t.
  misc_feature (960890)..(960890): n is a or c or g or t.
  misc_feature (1250239)..(1250239): n is a or c or g or t.
  misc_feature (1302432)..(1302434): n is a or c or g or t.
  misc_feature (1302471)..(1302471): n is a or c or g or t.
  misc_feature (1302488)..(1302488): n is a or c or g or t.
  misc_feature (1674836)..(1674836): n is a or c or g or t.
MSEPNEVIEEFETYLDLEGKSPHTIRMYTYYVRRYLEWGGDLNAHSALRFLAHLRKNGYSNRSLNLVVQALRAYFRFEGLDDEAERLKPPKVPRSLPKALTREEVKRLLSVIPPTRKRDRLIVLLLYGAGLRVSELCNLKKDDVDLDRGLIVVRGGKGAKDRVVPIPKYLADEIRAYLESRSDESEYLLVEDRRRRKDKLSTRNVWYLLKRYGQKAGVEVTPHKLRHSFATHLLEEGVDIRAIQELLGHSNLSTTQIYTKVTVEHLRKAQEKAKLIEKLMGE

SEQ ID NO: 1349 - protein, 195 aa, Thermococcus kodakaraensis KOD1
  misc_feature (321437)..(321437): n is a or c or g or t.
  misc_feature (527833)..(527833): n is a or c or g or t.
  misc_feature (527901)..(527901): n is a or c or g or t.
  misc_feature (527978)..(527978): n is a or c or g or t.
  misc_feature (960838)..(960839): n is a or c or g or t.
  misc_feature (960860)..(960861): n is a or c or g or t.
  misc_feature (960872)..(960873): n is a or c or g or t.
  misc_feature (960879)..(960879): n is a or c or g or t.
  misc_feature (960890)..(960890): n is a or c or g or t.
  misc_feature (1250239)..(1250239): n is a or c or g or t.
  misc_feature (1302432)..(1302434): n is a or c or g or t.
  misc_feature (1302471)..(1302471): n is a or c or g or t.
  misc_feature (1302488)..(1302488): n is a or c or g or t.
  misc_feature (1674836)..(1674836): n is a or c or g or t.
MKAVILAFPEKPWENYTIPIKDEPVVKLTEMRFRMSKRIDEVLTIVRKDKLRIYSLHVSNPVPVIARNKMEALLKAMPDEPFFLAEGNMPLIQPFLVNYLVGIYLEDEPEAVIPVWKDGTAEVTHAVYEPDALSAAIEAALSEGHKTLSSITEFLDFEPVSVEELIKKNPKVSLSFFRVKSSLDKAFAEENLGER

SEQ ID NO: 1350 - protein, 262 aa, Thermococcus kodakaraensis KOD1
  misc_feature (321437)..(321437): n is a or c or g or t.
  misc_feature (527833)..(527833): n is a or c or g or t.
  misc_feature (527901)..(527901): n is a or c or g or t.
  misc_feature (527978)..(527978): n is a or c or g or t.
  misc_feature (960838)..(960839): n is a or c or g or t.
  misc_feature (960860)..(960861): n is a or c or g or t.
  misc_feature (960872)..(960873): n is a or c or g or t.
  misc_feature (960879)..(960879): n is a or c or g or t.
  misc_feature (960890)..(960890): n is a or c or g or t.
  misc_feature (1250239)..(1250239): n is a or c or g or t.
  misc_feature (1302432)..(1302434): n is a or c or g or t.
  misc_feature (1302471)..(1302471): n is a or c or g or t.
  misc_feature (1302488)..(1302488): n is a or c or g or t.
  misc_feature (1674836)..(1674836): n is a or c or g or t.
MIEAENVHFAYNGKEVLRGIDFEMGQEIVALVGPNGSGKTTLAKHFNGLLKPSKGRVLVDGLDTREHTVAELSRLVGYVFQNPEHMFFEETVFNEVAFGPRNLGLSEEEVEERVKWALKSVGLEGFEDRTPYSLSGGEKQRLAIACVLAMKPKYLILDEPTTGLDARAEEEVVEVIRSLHESGHGILLITHDMDLVVRLAERVVLLHGGRKLFDGPVEEFFTAFDVEKYGLERPEVVELGERLGVGFVRSIEEILAKLGGEV

SEQ ID NO: 1351 - protein, 288 aa, Thermococcus kodakaraensis KOD1
  misc_feature (321437)..(321437): n is a or c or g or t.
  misc_feature (527833)..(527833): n is a or c or g or t.
  misc_feature (527901)..(527901): n is a or c or g or t.
  misc_feature (527978)..(527978): n is a or c or g or t.
  misc_feature (960838)..(960839): n is a or c or g or t.
  misc_feature (960860)..(960861): n is a or c or g or t.
  misc_feature (960872)..(960873): n is a or c or g or t.
  misc_feature (960879)..(960879): n is a or c or g or t.
  misc_feature (960890)..(960890): n is a or c or g or t.
  misc_feature (1250239)..(1250239): n is a or c or g or t.
  misc_feature (1302432)..(1302434): n is a or c or g or t.
  misc_feature (1302471)..(1302471): n is a or c or g or t.
  misc_feature (1302488)..(1302488): n is a or c or g or t.
  misc_feature (1674836)..(1674836): n is a or c or g or t.
VEVLFIGCAQKSFKAPVQQSPVVRMSVEGAVIDFFYRYFWEPMFTRSGYNAVNTFVYALLFGLGVIYTYKWIIKPLKIPVDERLFWAVTPMVVFGATVRALVDGGVLPQHPLILTPGIFFTAFFLILPAIYADSKLGMYPKITVAWGTILALWANYLLVTHAKNWEPYELTLIHTAVSFAAVFIFYRWRPFDRLYLYPVLAHYFDVASTVVAIHFYGYREVHWIENHLVNWFGAYIYYPWITLILVVVYYALKELVTDEEERRFWYLAIYILGLGPAIRDPAQMILQL

SEQ ID NO: 1352 - protein, 272 aa, Thermococcus kodakaraensis KOD1
  misc_feature (321437)..(321437): n is a or c or g or t.
  misc_feature (527833)..(527833): n is a or c or g or t.
  misc_feature (527901)..(527901): n is a or c or g or t.
  misc_feature (527978)..(527978): n is a or c or g or t.
  misc_feature (960838)..(960839): n is a or c or g or t.
  misc_feature (960860)..(960861): n is a or c or g or t.
  misc_feature (960872)..(960873): n is a or c or g or t.
  misc_feature (960879)..(960879): n is a or c or g or t.
  misc_feature (960890)..(960890): n is a or c or g or t.
  misc_feature (1250239)..(1250239): n is a or c or g or t.
  misc_feature (1302432)..(1302434): n is a or c or g or t.
  misc_feature (1302471)..(1302471): n is a or c or g or t.
  misc_feature (1302488)..(1302488): n is a or c or g or t.
  misc_feature (1674836)..(1674836): n is a or c or g or t.
VHMLITQVCSKMLKKRPINVTHGGERMLKVENLHVSVEDKEILRGVDLEVNPGEFHVIMGPNGSGKSTLALTIAGHPKYRVTDGKILFEGEDITELGPDERAKRGILLAFQVPPEVEGVKVIEFLQQVLVELKGMDPAEAYDLVVEKAKELWFKEEDLHRYVNVGFSGGERKRLELLQALLIEPKLLILDEPDSGVDVDSLSIISRKIEELHQRGTAILLITHYGRILGHLDREKLTVHVMKDGRIVKTGSGELVDQIDREGFARIFEEVGA

SEQ ID NO: 1353 - protein, 385 aa, Thermococcus kodakaraensis KOD1
  misc_feature (321437)..(321437): n is a or c or g or t.
  misc_feature (527833)..(527833): n is a or c or g or t.
  misc_feature (527901)..(527901): n is a or c or g or t.
  misc_feature (527978)..(527978): n is a or c or g or t.
  misc_feature (960838)..(960839): n is a or c or g or t.
  misc_feature (960860)..(960861): n is a or c or g or t.
  misc_feature (960872)..(960873): n is a or c or g or t.
  misc_feature (960879)..(960879): n is a or c or g or t.
  misc_feature (960890)..(960890): n is a or c or g or t.
  misc_feature (1250239)..(1250239): n is a or c or g or t.
  misc_feature (1302432)..(1302434): n is a or c or g or t.
  misc_feature (1302471)..(1302471): n is a or c or g or t.
  misc_feature (1302488)..(1302488): n is a or c or g or t.
  misc_feature (1674836)..(1674836): n is a or c or g or t.
MELGLPAAFMLILTLTLPLALAEPVQMWRYTDQCAAFSVSFNSKGYVGLAFGYDAELLSPEGKLLLKAPTRGIAYSSALSDNNVLLIGTEGSWVQAFSEPKKLLWERKLREAVVSVSISADGKVAVAGDAAGYVYLFQDGELKWERNIGKYVWSVVLSGERVLAGSNAGIHVFKLDGTLLWKKAFNGAVRKIVPLKNGIAVLVVPQDESWSELIFLSDSGSVIWKRHFNGYVRSISTDGEYIAAAGMTGNVTLLDSAGKLLYSTPLLSYANDVATFKGYTVVAYGKNVELIAPNGTVEWFESFNGTVYHVGFSPTGYFVVDYGSHEIDNCYSVIVAYSVAPTAQGQSETAGEKSSVKPGYSPLIAGGILVGIALLGVLIWLRRKQ

SEQ ID NO: 1354 - protein, 69 aa, Thermococcus kodakaraensis KOD1
  misc_feature (321437)..(321437): n is a or c or g or t.
  misc_feature (527833)..(527833): n is a or c or g or t.
  misc_feature (527901)..(527901): n is a or c or g or t.
  misc_feature (527978)..(527978): n is a or c or g or t.
  misc_feature (960838)..(960839): n is a or c or g or t.
  misc_feature (960860)..(960861): n is a or c or g or t.
  misc_feature (960872)..(960873): n is a or c or g or t.
  misc_feature (960879)..(960879): n is a or c or g or t.
  misc_feature (960890)..(960890): n is a or c or g or t.
  misc_feature (1250239)..(1250239): n is a or c or g or t.
  misc_feature (1302432)..(1302434): n is a or c or g or t.
  misc_feature (1302471)..(1302471): n is a or c or g or t.
  misc_feature (1302488)..(1302488): n is a or c or g or t.
  misc_feature (1674836)..(1674836): n is a or c or g or t.
VRHPIYSIWGFLVIPGFSLLFGGFMLLLPLVYWAGVLGFIGEEEKALEEMFGDGWREYAERTPRFVPRP

SEQ ID NO: 1355 - protein, 76 aa, Thermococcus kodakaraensis KOD1
  misc_feature (321437)..(321437): n is a or c or g or t.
  misc_feature (527833)..(527833): n is a or c or g or t.
  misc_feature (527901)..(527901): n is a or c or g or t.
  misc_feature (527978)..(527978): n is a or c or g or t.
  misc_feature (960838)..(960839): n is a or c or g or t.
  misc_feature (960860)..(960861): n is a or c or g or t.
  misc_feature (960872)..(960873): n is a or c or g or t.
  misc_feature (960879)..(960879): n is a or c or g or t.
  misc_feature (960890)..(960890): n is a or c or g or t.
  misc_feature (1250239)..(1250239): n is a or c or g or t.
  misc_feature (1302432)..(1302434): n is a or c or g or t.
  misc_feature (1302471)..(1302471): n is a or c or g or t.
  misc_feature (1302488)..(1302488): n is a or c or g or t.
  misc_feature (1674836)..(1674836): n is a or c or g or t.
VHGGGRMRLSEVEPGRTVRVVGIRGGPKARLLTMGVTPGAVVKVVKRAPLGDPIEVEVRGYKLSLRKEEADYVEVE

SEQ ID NO: 1356 - protein, 75 aa, Thermococcus kodakaraensis KOD1
  misc_feature (321437)..(321437): n is a or c or g or t.
  misc_feature (527833)..(527833): n is a or c or g or t.
  misc_feature (527901)..(527901): n is a or c or g or t.
  misc_feature (527978)..(527978): n is a or c or g or t.
  misc_feature (960838)..(960839): n is a or c or g or t.
  misc_feature (960860)..(960861): n is a or c or g or t.
  misc_feature (960872)..(960873): n is a or c or g or t.
  misc_feature (960879)..(960879): n is a or c or g or t.
  misc_feature (960890)..(960890): n is a or c or g or t.
  misc_feature (1250239)..(1250239): n is a or c or g or t.
  misc_feature (1302432)..(1302434): n is a or c or g or t.
  misc_feature (1302471)..(1302471): n is a or c or g or t.
  misc_feature (1302488)..(1302488): n is a or c or g or t.
  misc_feature (1674836)..(1674836): n is a or c or g or t.
MMPLAFVEEGRRAVIRGIAGGRGVIHRLAELGLSPGTEVVVVRNQMAGPMMVTVRGTQLALGRGLAMKIQVEVIG

SEQ ID NO: 1357 - protein, 169 aa, Thermococcus kodakaraensis KOD1
  misc_feature (321437)..(321437): n is a or c or g or t.
  misc_feature (527833)..(527833): n is a or c or g or t.
  misc_feature (527901)..(527901): n is a or c or g or t.
  misc_feature (527978)..(527978): n is a or c or g or t.
  misc_feature (960838)..(960839): n is a or c or g or t.
  misc_feature (960860)..(960861): n is a or c or g or t.
  misc_feature (960872)..(960873): n is a or c or g or t.
  misc_feature (960879)..(960879): n is a or c or g or t.
  misc_feature (960890)..(960890): n is a or c or g or t.
  misc_feature (1250239)..(1250239): n is a or c or g or t.
  misc_feature (1302432)..(1302434): n is a or c or g or t.
  misc_feature (1302471)..(1302471): n is a or c or g or t.
  misc_feature (1302488)..(1302488): n is a or c or g or t.
  misc_feature (1674836)..(1674836): n is a or c or g or t.
MSKAKSYPLEEICYRPIGVIHSPFKEPKDVPIQASAARGIRGTVDVFPEFEEGLKDIEGFSHVILIYHFHRARFKSLLVRPYMDENYHGVFATRAPARPNPIGISIVRLVERRGNVLIVEDVDVLDGTPLLDIKPYVPEFDYREGVRTGWLEENVHKLPEAKDDGRFAK

SEQ ID NO: 1358 - protein, 315 aa, Thermococcus kodakaraensis KOD1
  misc_feature (321437)..(321437): n is a or c or g or t.
  misc_feature (527833)..(527833): n is a or c or g or t.
  misc_feature (527901)..(527901): n is a or c or g or t.
  misc_feature (527978)..(527978): n is a or c or g or t.
  misc_feature (960838)..(960839): n is a or c or g or t.
  misc_feature (960860)..(960861): n is a or c or g or t.
  misc_feature (960872)..(960873): n is a or c or g or t.
  misc_feature (960879)..(960879): n is a or c or g or t.
  misc_feature (960890)..(960890): n is a or c or g or t.
  misc_feature (1250239)..(1250239): n is a or c or g or t.
  misc_feature (1302432)..(1302434): n is a or c or g or t.
  misc_feature (1302471)..(1302471): n is a or c or g or t.
  misc_feature (1302488)..(1302488): n is a or c or g or t.
  misc_feature (1674836)..(1674836): n is a or c or g or t.
MIAFGPVPSRRLGRSLGVNNIPDKVCTYACVYCQIGKTLRMEIKRRPFYEPELIFREVKEKVEEALARSERIDYITFVPDGEPTLDINLGKEAELLKSLEIPPAILTNSSLIWREDVREDLLKFDFVSLKVDAVSEPLWRRIDRPHKSLSLEKILEGMLEFRKEFKGKIVTETMLIDGIDYGNEFEKIAEFLRELKPDKAYIAVPTRPPAEPWVKPAKEDVINHAYQVFSEILGDERVEYLIGYEGNAFAFTGNVEEDLLSITSVHPMREDAVAEFLEKANADWSIVEKLLKEGKLIELEYNGKRFYMRRLKSRE

SEQ ID NO: 1359 - protein, 476 aa, Thermococcus kodakaraensis KOD1
  misc_feature (321437)..(321437): n is a or c or g or t.
  misc_feature (527833)..(527833): n is a or c or g or t.
  misc_feature (527901)..(527901): n is a or c or g or t.
  misc_feature (527978)..(527978): n is a or c or g or t.
  misc_feature (960838)..(960839): n is a or c or g or t.
  misc_feature (960860)..(960861): n is a or c or g or t.
  misc_feature (960872)..(960873): n is a or c or g or t.
  misc_feature (960879)..(960879): n is a or c or g or t.
  misc_feature (960890)..(960890): n is a or c or g or t.
  misc_feature (1250239)..(1250239): n is a or c or g or t.
  misc_feature (1302432)..(1302434): n is a or c or g or t.
  misc_feature (1302471)..(1302471): n is a or c or g or t.
  misc_feature (1302488)..(1302488): n is a or c or g or t.
  misc_feature (1674836)..(1674836): n is a or c or g or t.
VMCMHELVEFAVEKALELGADYAEARFEEKNGTELVMKNGNAEGLGILADRGIGIRVLVDGGMGFASTNVLTKESVAEAVKKAVKLAKAASKVRNEPIRFSEEDFHEVYYEVKMRKDFRDIPPEEKLELLKKVEEEVKGTGVNVPMRFLRYSDWMWHKIIAHSDGGFVESYIPRVSLTYNLVVFENGQMEQAPFVQRAFSGGLELLEKDEPWKWAVKDVMALKRLIYEGQKPPEGKVDLVISPEVAGIAVHESVGHPYEADRIFGREAAQAGESFVKPDMLGERIGSDVVTVIEDPTIPNSWGFYLYDDEGVKARPRYLIRNGIINEFLTNREYAYKLGQRSNASARAINYNREPIVRMANTYLAPGDHSFEELIEDIKLGVYMVSFNEWNIDDRRYQQRYIGREAYLIENGEIKHPVRRPILEITTRALWSSVDAVGKEVEFYPGTCGKGEPGQGVPVWMGGAHARLRDIPLRRP

SEQ ID NO: 1360 - protein, 219 aa, Thermococcus kodakaraensis KOD1
  misc_feature (321437)..(321437): n is a or c or g or t.
  misc_feature (527833)..(527833): n is a or c or g or t.
  misc_feature (527901)..(527901): n is a or c or g or t.
  misc_feature (527978)..(527978): n is a or c or g or t.
  misc_feature (960838)..(960839): n is a or c or g or t.
  misc_feature (960860)..(960861): n is a or c or g or t.
  misc_feature (960872)..(960873): n is a or c or g or t.
  misc_feature (960879)..(960879): n is a or c or g or t.
  misc_feature (960890)..(960890): n is a or c or g or t.
  misc_feature (1250239)..(1250239): n is a or c or g or t.
  misc_feature (1302432)..(1302434): n is a or c or g or t.
  misc_feature (1302471)..(1302471): n is a or c or g or t.
  misc_feature (1302488)..(1302488): n is a or c or g or t.
  misc_feature (1674836)..(1674836): n is a or c or g or t.
MKRIKFRFLNSSDVFSDFKWFIEAIEWAYGDTHFMVGDEIIKLVELKFKEEVNPQDVINRMRNLPYVEDVKLIPLKNGHYYLYTRAKLPRHPNAEEAFDILDLQKRGFLIFEKGTMTREESFLYVVCEENLVPEVISAIKRTYNAEVASIEDYTPNESIFSKLTEKQLKTLLVAYKSGYFDSPKRVTLRDLSQMLGLSPSTVKEHLRKGLKKVLEGVIE

SEQ ID NO: 1361 - protein, 13 aa, Thermococcus kodakaraensis KOD1
  misc_feature (321437)..(321437): n is a or c or g or t.
  misc_feature (527833)..(527833): n is a or c or g or t.
  misc_feature (527901)..(527901): n is a or c or g or t.
  misc_feature (527978)..(527978): n is a or c or g or t.
  misc_feature (960838)..(960839): n is a or c or g or t.
  misc_feature (960860)..(960861): n is a or c or g or t.
  misc_feature (960872)..(960873): n is a or c or g or t.
  misc_feature (960879)..(960879): n is a or c or g or t.
  misc_feature (960890)..(960890): n is a or c or g or t.
  misc_feature (1250239)..(1250239): n is a or c or g or t.
  misc_feature (1302432)..(1302434): n is a or c or g or t.
  misc_feature (1302471)..(1302471): n is a or c or g or t.
  misc_feature (1302488)..(1302488): n is a or c or g or t.
  misc_feature (1674836)..(1674836): n is a or c or g or t.
MCGGNYNYFKALF

SEQ ID NO: 1362 - protein, 283 aa, Thermococcus kodakaraensis KOD1
  misc_feature (321437)..(321437): n is a or c or g or t.
  misc_feature (527833)..(527833): n is a or c or g or t.
  misc_feature (527901)..(527901): n is a or c or g or t.
  misc_feature (527978)..(527978): n is a or c or g or t.
  misc_feature (960838)..(960839): n is a or c or g or t.
  misc_feature (960860)..(960861): n is a or c or g or t.
  misc_feature (960872)..(960873): n is a or c or g or t.
  misc_feature (960879)..(960879): n is a or c or g or t.
  misc_feature (960890)..(960890): n is a or c or g or t.
  misc_feature (1250239)..(1250239): n is a or c or g or t.
  misc_feature (1302432)..(1302434): n is a or c or g or t.
  misc_feature (1302471)..(1302471): n is a or c or g or t.
  misc_feature (1302488)..(1302488): n is a or c or g or t.
  misc_feature (1674836)..(1674836): n is a or c or g or t.
MPVIEVKNIRKYYGDVRGVENLSFEVEEGEIYGFLGPNGAGKTTTVKILVKIIRDYEGTAKVLGKDLREWGKDYYNRIGVSFEFPAVYSRLTALENLEFFASFYKKHLDPMEVLKMVGLDKEADQLVAGFSKGMRKKLDIARALLPDPDILFLDEPLEGLDPASARKFKDLFLEMRESGKTIFLTTHNMYVADELCDRVAFIVDGSVRLVDNPGELKVKMGKRLVKVEYVENGSVKTAEFPLEGIGQNEEFLNILRNHEIRRINTEEPTLEEIFLKVTGRRLV

SEQ ID NO: 1363 - protein, 92 aa, Thermococcus kodakaraensis KOD1
  misc_feature (321437)..(321437): n is a or c or g or t.
  misc_feature (527833)..(527833): n is a or c or g or t.
  misc_feature (527901)..(527901): n is a or c or g or t.
  misc_feature (527978)..(527978): n is a or c or g or t.
  misc_feature (960838)..(960839): n is a or c or g or t.
  misc_feature (960860)..(960861): n is a or c or g or t.
  misc_feature (960872)..(960873): n is a or c or g or t.
  misc_feature (960879)..(960879): n is a or c or g or t.
  misc_feature (960890)..(960890): n is a or c or g or t.
  misc_feature (1250239)..(1250239): n is a or c or g or t.
  misc_feature (1302432)..(1302434): n is a or c or g or t.
  misc_feature (1302471)..(1302471): n is a or c or g or t.
  misc_feature (1302488)..(1302488): n is a or c or g or t.
  misc_feature (1674836)..(1674836): n is a or c or g or t.
VSDNIIAVSPTDIGILVDIVKKYLDSGHSLVVLDGFEYLVLENGFESTLKFLLSLKDFAISQGGTLVLLLEPRAFSEKQLKIIQREFEEFEF

SEQ ID NO: 1364 - protein, 18 aa, Thermococcus kodakaraensis KOD1
  misc_feature (321437)..(321437): n is a or c or g or t.
  misc_feature (527833)..(527833): n is a or c or g or t.
  misc_feature (527901)..(527901): n is a or c or g or t.
  misc_feature (527978)..(527978): n is a or c or g or t.
  misc_feature (960838)..(960839): n is a or c or g or t.
  misc_feature (960860)..(960861): n is a or c or g or t.
  misc_feature (960872)..(960873): n is a or c or g or t.
  misc_feature (960879)..(960879): n is a or c or g or t.
  misc_feature (960890)..(960890): n is a or c or g or t.
  misc_feature (1250239)..(1250239): n is a or c or g or t.
  misc_feature (1302432)..(1302434): n is a or c or g or t.
  misc_feature (1302471)..(1302471): n is a or c or g or t.
  misc_feature (1302488)..(1302488): n is a or c or g or t.
  misc_feature (1674836)..(1674836): n is a or c or g or t.
MATIPRVMMPDRTNLTVG

SEQ ID NO: 1365 - protein, 336 aa, Thermococcus kodakaraensis KOD1
  misc_feature (321437)..(321437): n is a or c or g or t.
  misc_feature (527833)..(527833): n is a or c or g or t.
  misc_feature (527901)..(527901): n is a or c or g or t.
  misc_feature (527978)..(527978): n is a or c or g or t.
  misc_feature (960838)..(960839): n is a or c or g or t.
  misc_feature (960860)..(960861): n is a or c or g or t.
  misc_feature (960872)..(960873): n is a or c or g or t.
  misc_feature (960879)..(960879): n is a or c or g or t.
  misc_feature (960890)..(960890): n is a or c or g or t.
  misc_feature (1250239)..(1250239): n is a or c or g or t.
  misc_feature (1302432)..(1302434): n is a or c or g or t.
  misc_feature (1302471)..(1302471): n is a or c or g or t.
  misc_feature (1302488)..(1302488): n is a or c or g or t.
  misc_feature (1674836)..(1674836): n is a or c or g or t.
VVDMRPKVFITRAIPENGIEMLKEHFEVEVWPEEREIPREVLLKKVRDVDALVTMLSERIDSEVFDAAPRLRIVANYAVGYDNIDVEEATRRGIYVTNTPDVLTDATADFAWTLLLATARRLIEADHFTRSGEWKRRGIAWHPRWFLGYDVYGKTIGIVGFGRIGQAVARRARGFGMRILYYSRSRKPEAEKELGAEFRSLEDLLRESDFVVLAVPLTKETQYMINEERLRLMKKTAILVNIARGKVVDTKALMKALKEGWIAGAGLDVYEEEPYYNEELFSLKNVVLAPHIGSATYGAREGMAELVARNLIAFKNGEVPPTLVNKEVVKVRKPGF

SEQ ID NO: 1366 - protein, 582 aa, Thermococcus kodakaraensis KOD1
  misc_feature (321437)..(321437): n is a or c or g or t.
  misc_feature (527833)..(527833): n is a or c or g or t.
  misc_feature (527901)..(527901): n is a or c or g or t.
  misc_feature (527978)..(527978): n is a or c or g or t.
  misc_feature (960838)..(960839): n is a or c or g or t.
  misc_feature (960860)..(960861): n is a or c or g or t.
  misc_feature (960872)..(960873): n is a or c or g or t.
  misc_feature (960879)..(960879): n is a or c or g or t.
  misc_feature (960890)..(960890): n is a or c or g or t.
  misc_feature (1250239)..(1250239): n is a or c or g or t.
  misc_feature (1302432)..(1302434): n is a or c or g or t.
  misc_feature (1302471)..(1302471): n is a or c or g or t.
  misc_feature (1302488)..(1302488): n is a or c or g or t.
  misc_feature (1674836)..(1674836): n is a or c or g or t.
MLTFFGMALKLNPEARAVYRDITSQIKSRLVLKESSDYLENFSPTNDRGEILKRQEYLREALRRVKPGLKELIKRVRFIRFTRDYLHDRVLIVDESEVETAIKLGLCDVTTNPEEAEGYPLVLSTIGYGIDVELLPSQVAPELYVLPLWENRETLKALEEIGKLTGEGSVAGEILEHLSPFGEVVEKEKLLGSLDELIAEKERELNERIEEKLEKFSLTLTGRDLVKFLNELREGNYEAIFSHFREIEGEILDMINEAESELSKVLGLHVELFSREELYPVRIPPEVVEGLRTELERELKVEVYMKAREIAEKVRPLLPKLREELSKIRELDFLQAVKAFTEGFTFPEIAESGIAFLNGRHLFIENPQPVSYVVGEKPEWFDVPGAENVRGENVVILTGANSGGKTSLLELITQVSILAHMGFPVPAERARVGVLDELFFFRRKRSVYGAGAFETALRSFVRSLRGKGNKLILIDEFEAITEPGAAVKIIGELLKVAHEKGFHVVIVSHLGEDLKKELPFARVDGIEAKGLDENLNLIVDRQPVFGRLGRSTPELIVERLARKARGAEKEIYERVLRKFRES

SEQ ID NO: 1367 - protein, 94 aa, Thermococcus kodakaraensis KOD1
  misc_feature (321437)..(321437): n is a or c or g or t.
  misc_feature (527833)..(527833): n is a or c or g or t.
  misc_feature (527901)..(527901): n is a or c or g or t.
  misc_feature (527978)..(527978): n is a or c or g or t.
  misc_feature (960838)..(960839): n is a or c or g or t.
  misc_feature (960860)..(960861): n is a or c or g or t.
  misc_feature (960872)..(960873): n is a or c or g or t.
  misc_feature (960879)..(960879): n is a or c or g or t.
  misc_feature (960890)..(960890): n is a or c or g or t.
  misc_feature (1250239)..(1250239): n is a or c or g or t.
  misc_feature (1302432)..(1302434): n is a or c or g or t.
  misc_feature (1302471)..(1302471): n is a or c or g or t.
  misc_feature (1302488)..(1302488): n is a or c or g or t.
  misc_feature (1674836)..(1674836): n is a or c or g or t.
MLRLFVPRELLVESSFGENPGVFSLSGIITIPEINVIVNKRIINTKLTSLAVSSIAESLIKNHAIIRNIMVRIIYIDKRLYTNKDFWKFSSIIT

SEQ ID NO: 1368 - protein, 548 aa, Thermococcus kodakaraensis KOD1
  misc_feature (321437)..(321437): n is a or c or g or t.
  misc_feature (527833)..(527833): n is a or c or g or t.
  misc_feature (527901)..(527901): n is a or c or g or t.
  misc_feature (527978)..(527978): n is a or c or g or t.
  misc_feature (960838)..(960839): n is a or c or g or t.
  misc_feature (960860)..(960861): n is a or c or g or t.
  misc_feature (960872)..(960873): n is a or c or g or t.
  misc_feature (960879)..(960879): n is a or c or g or t.
  misc_feature (960890)..(960890): n is a or c or g or t.
  misc_feature (1250239)..(1250239): n is a or c or g or t.
  misc_feature (1302432)..(1302434): n is a or c or g or t.
  misc_feature (1302471)..(1302471): n is a or c or g or t.
  misc_feature (1302488)..(1302488): n is a or c or g or t.
  misc_feature (1674836)..(1674836): n is a or c or g or t.
MAQLSGQPVVILPEGTQRYVGRDAQRLNILAARIIAETVRTTLGPKGMDKMLVDSLGDIVVTNDGATILDKIDLQHPAAKMMVEVAKTQDKEAGDGTTTAVVIAGELLRKAEELLDQNIHPSIIIKGYALAAEKAQEILDEIAIRVDPDDEETLLKIAATSITGKNAESHKELLAKLAVEAVKQVAEKKDGKYVVDLDNIKFEKKAGEGVEESELVRGVVIDKEVVHPRMPKRVENAKIALINEALEVKKTETDAKINITSPDQLMSFLEQEEKMLKDMVDHIAQTGANVVFVQKGIDDLAQHYLAKYGIMAVRRVKKSDMEKLAKATGAKIVTNVKDLTPEDLGYAEVVEERKLAGENMIFVEGCKNPKAVTILIRGGTEHVIDEVERALEDAVKVVKDVMEDGAVLPAGGAPEIELAIRLDEYAKQVGGKEALAIENFADALKIIPKTLAENAGLDTVEMLVKVISEHKNRGLGIGIDVFEGKPADMLEKGIIEPLRVKKQAIKSASEAAIMILRIDDVIAAKATKPEGGQGGGMPGGMGGMDMGM

SEQ ID NO: 1369 - protein, 835 aa, Thermococcus kodakaraensis KOD1
  misc_feature (321437)..(321437): n is a or c or g or t.
  misc_feature (527833)..(527833): n is a or c or g or t.
  misc_feature (527901)..(527901): n is a or c or g or t.
  misc_feature (527978)..(527978): n is a or c or g or t.
  misc_feature (960838)..(960839): n is a or c or g or t.
  misc_feature (960860)..(960861): n is a or c or g or t.
  misc_feature (960872)..(960873): n is a or c or g or t.
  misc_feature (960879)..(960879): n is a or c or g or t.
  misc_feature (960890)..(960890): n is a or c or g or t.
  misc_feature (1250239)..(1250239): n is a or c or g or t.
  misc_feature (1302432)..(1302434): n is a or c or g or t.
  misc_feature (1302471)..(1302471): n is a or c or g or t.
  misc_feature (1302488)..(1302488): n is a or c or g or t.
  misc_feature (1674836)..(1674836): n is a or c or g or t.
MIFGKEDEKVDEIKLRVAEALKRDVGRGIVRFDRKYQRKLGVEPGDIVALKGERVTAAIVANAHPDDRGLDIIRMDGYIRRNAGVSIGDYVTVSRAEVQEAKKVVLAPAQKGVFIQIPGEIVKQNLLGRPVVKGDLVVAGGQNEAVYSPFDELLRGFFEAMPIGFGELKFVVVNTVPKGIVQITYNTEVEVLPQAVEVKEESIPEVTYEDIGGLSDAIQKIREMVELPLKHPELFERLGIEPPKGVLLYGPPGTGKTLLAKAVANEANAHFIAINGPEIMSKFYGESEERLREIFKEAEENAPSIIFIDEIDAIAPKREEVVGEVEKRVVSQLLTLMDGLKSRGKVIVIAATNRPDALDPALRRPGRFDREIEVGVPDKQGRKEILQIHTRGMPLEPDYDKEAVLRVLREIREKGNFDAERVDKIIAEVENAKNESEVKEALKKDAEIYSEVRNRLIDKMLDELAEVTHGFVGADLAALAREAAMVVLRRLIKEGKISPEQERIPPEVLQELRVRRDDFYEALKMVEPSALREVLIEVPNVRWEDIGGLEDVKQELREAVEWPLKYPKAFERLGIEPPKGILLYGPPGTGKTLLAKAVANESQANFIAIRGPEVLSKWVGETEKRIREIFRKARQAAPTVVFIDEIDAIAPARGSEGDRVTDRLINQLLTEMDGIQENSGVVVIGATNRPDIIDPALLRPGRFDRLILVPAPDEKARLEIFKVHTRRVPLAGDVDLRELAKKTEGYTGADIAALVREAALIAMRRIMRELPREVVESESEEFLERLKVSKKDFEMAMKKVKPSVTPYMMEYYRSFEENRKKQAGKERGGPDYYTF

SEQ ID NO: 1370 - protein, 111 aa, Thermococcus kodakaraensis KOD1
  misc_feature (321437)..(321437): n is a or c or g or t.
  misc_feature (527833)..(527833): n is a or c or g or t.
  misc_feature (527901)..(527901): n is a or c or g or t.
  misc_feature (527978)..(527978): n is a or c or g or t.
  misc_feature (960838)..(960839): n is a or c or g or t.
  misc_feature (960860)..(960861): n is a or c or g or t.
  misc_feature (960872)..(960873): n is a or c or g or t.
  misc_feature (960879)..(960879): n is a or c or g or t.
  misc_feature (960890)..(960890): n is a or c or g or t.
  misc_feature (1250239)..(1250239): n is a or c or g or t.
  misc_feature (1302432)..(1302434): n is a or c or g or t.
  misc_feature (1302471)..(1302471): n is a or c or g or t.
  misc_feature (1302488)..(1302488): n is a or c or g or t.
  misc_feature (1674836)..(1674836): n is a or c or g or t.
MVKIMASKLRDVELITDTGIRLGWVYDLSFDEETGEILVIVAEPDEDLDVSEFVTDQEGLLLIPISAVKSIGEVIIIDSSKLAVKSKLKHLPSVTATAREKRLGGGLQRKG

SEQ ID NO: 1371 - protein, 185 aa, Thermococcus kodakaraensis KOD1
  misc_feature (321437)..(321437): n is a or c or g or t.
  misc_feature (527833)..(527833): n is a or c or g or t.
  misc_feature (527901)..(527901): n is a or c or g or t.
  misc_feature (527978)..(527978): n is a or c or g or t.
  misc_feature (960838)..(960839): n is a or c or g or t.
  misc_feature (960860)..(960861): n is a or c or g or t.
  misc_feature (960872)..(960873): n is a or c or g or t.
  misc_feature (960879)..(960879): n is a or c or g or t.
  misc_feature (960890)..(960890): n is a or c or g or t.
  misc_feature (1250239)..(1250239): n is a or c or g or t.
  misc_feature (1302432)..(1302434): n is a or c or g or t.
  misc_feature (1302471)..(1302471): n is a or c or g or t.
  misc_feature (1302488)..(1302488): n is a or c or g or t.
  misc_feature (1674836)..(1674836): n is a or c or g or t.
VSSLKRLCALAIGALVLVALFTTYSWHKAEEDLKLSRTVREESWGRVYLTVAEDIFEFGYMDRAFEDLLEKNASEDEIVEYAGAYYLMARHVERVFIFLSYELYEGYFKYYKIGRAFGNLERFFIDIRSKRGVNRTETIRTNIETFREISRIARKIGKYGDPRDIPEELADELLNTTKNLKLVYE

SEQ ID NO: 1372 - protein, 215 aa, Thermococcus kodakaraensis KOD1
  misc_feature (321437)..(321437): n is a or c or g or t.
  misc_feature (527833)..(527833): n is a or c or g or t.
  misc_feature (527901)..(527901): n is a or c or g or t.
  misc_feature (527978)..(527978): n is a or c or g or t.
  misc_feature (960838)..(960839): n is a or c or g or t.
  misc_feature (960860)..(960861): n is a or c or g or t.
  misc_feature (960872)..(960873): n is a or c or g or t.
  misc_feature (960879)..(960879): n is a or c or g or t.
  misc_feature (960890)..(960890): n is a or c or g or t.
  misc_feature (1250239)..(1250239): n is a or c or g or t.
  misc_feature (1302432)..(1302434): n is a or c or g or t.
  misc_feature (1302471)..(1302471): n is a or c or g or t.
  misc_feature (1302488)..(1302488): n is a or c or g or t.
  misc_feature (1674836)..(1674836): n is a or c or g or t.
MKKFPARLASWEDIERWAKEGAWKILEEGWKPDVVVGLARGGWVAARLYCDYLGIKDLVSLKVEHWGVTATPDGKAKLKYGTNYDLSGKKVLIVDDISDTGESLTLAKNYVESKSPAEVRTATLLTIRGSRFKPEYYGEEIDWAWIVFPWNFVEDMINLVSNILEEKEAVSTDEIIELFKELHGLEVPKGKLEEALRMAEMRKVFKFREGKWLKA

SEQ ID NO: 1373 - protein, 76 aa, Thermococcus kodakaraensis KOD1
  misc_feature (321437)..(321437): n is a or c or g or t.
  misc_feature (527833)..(527833): n is a or c or g or t.
  misc_feature (527901)..(527901): n is a or c or g or t.
  misc_feature (527978)..(527978): n is a or c or g or t.
  misc_feature (960838)..(960839): n is a or c or g or t.
  misc_feature (960860)..(960861): n is a or c or g or t.
  misc_feature (960872)..(960873): n is a or c or g or t.
  misc_feature (960879)..(960879): n is a or c or g or t.
  misc_feature (960890)..(960890): n is a or c or g or t.
  misc_feature (1250239)..(1250239): n is a or c or g or t.
  misc_feature (1302432)..(1302434): n is a or c or g or t.
  misc_feature (1302471)..(1302471): n is a or c or g or t.
  misc_feature (1302488)..(1302488): n is a or c or g or t.
  misc_feature (1674836)..(1674836): n is a or c or g or t.
MHSESIDEVIENYEELKETYLNDHSRARIVRIVFNEDNDLPLAIEFHRKDDSFKGFTIAIGKPHIKSNGNGKKEKE

SEQ ID NO: 1374 - protein, 333 aa, Thermococcus kodakaraensis KOD1
  misc_feature (321437)..(321437): n is a or c or g or t.
  misc_feature (527833)..(527833): n is a or c or g or t.
  misc_feature (527901)..(527901): n is a or c or g or t.
  misc_feature (527978)..(527978): n is a or c or g or t.
  misc_feature (960838)..(960839): n is a or c or g or t.
  misc_feature (960860)..(960861): n is a or c or g or t.
  misc_feature (960872)..(960873): n is a or c or g or t.
  misc_feature (960879)..(960879): n is a or c or g or t.
  misc_feature (960890)..(960890): n is a or c or g or t.
  misc_feature (1250239)..(1250239): n is a or c or g or t.
  misc_feature (1302432)..(1302434): n is a or c or g or t.
  misc_feature (1302471)..(1302471): n is a or c or g or t.
  misc_feature (1302488)..(1302488): n is a or c or g or t.
  misc_feature (1674836)..(1674836): n is a or c or g or t.
MRRALLIVAVVIALSGLFFPPATASGEKPLVVATIGPLGSIVREAFPGVDVVVLIPPGVDPHDYQMTAEQVELVQRASVIVTTGGHLPVEKRMVELKENGEIAGKILLVDDYKKYGFRYLKEHWYNEKDNPHGVWLDPYNAIAIAEATEEALIQSDPARENEYRLQFEAFKARVLGIVEAYRALINSNATAVIQMPPDQYALEWLGIKAVEALKPEEEVPAKGVDTLVEKAKEADILVYGLDSPDQMKKAMMELAEKSEKPLAGITVFWSSGNYTEWLVKNTAAIIEALKGESLRETPQETRKETGTNTERYILLSLLTGIVLGTALGVIMKK

SEQ ID NO: 1375 - protein, 408 aa, Thermococcus kodakaraensis KOD1
  misc_feature (321437)..(321437): n is a or c or g or t.
  misc_feature (527833)..(527833): n is a or c or g or t.
  misc_feature (527901)..(527901): n is a or c or g or t.
  misc_feature (527978)..(527978): n is a or c or g or t.
  misc_feature (960838)..(960839): n is a or c or g or t.
  misc_feature (960860)..(960861): n is a or c or g or t.
  misc_feature (960872)..(960873): n is a or c or g or t.
  misc_feature (960879)..(960879): n is a or c or g or t.
  misc_feature (960890)..(960890): n is a or c or g or t.
  misc_feature (1250239)..(1250239): n is a or c or g or t.
  misc_feature (1302432)..(1302434): n is a or c or g or t.
  misc_feature (1302471)..(1302471): n is a or c or g or t.
  misc_feature (1302488)..(1302488): n is a or c or g or t.
  misc_feature (1674836)..(1674836): n is a or c or g or t.
MSHNWNVNSFLKEYQRLLQRAIDEISENTTWREKKVTHRYSVGSRNYHYYETTRLIPYFPQSNEFKRELRNKLLKDWPFAKHYIDSAIKTAYSILKSWRGNYLKGKRKRAKPVVKRKFVRVKTTLMKVEGSRIRITVKPREEYLELDFSKEWFYERVKDWKVGELIIRENDVLLTFSKEVEFSGRIKIGIDSNLTSLDIFHPEKGWIRVDLSELHRIAETYDRIIDGLKSVQRKAPKRIGVLLKKYWTRRRNRIEDYLNKLAVQLSREFPDAVFVFEDLNKFKMLQNGSRKFNRKLSRATWKKIVGKLSYRVPVEFVNPAYTSSTCPVCGSWLESRNGRVVCHNCGFEADRQFVGSFNVFVRGLGVALSGAELDDLLPNEPRGELNVMKPKSVVRVDLNGGRFTHVPP

SEQ ID NO: 1376 - protein, 17 aa, Thermococcus kodakaraensis KOD1
  misc_feature (321437)..(321437): n is a or c or g or t.
  misc_feature (527833)..(527833): n is a or c or g or t.
  misc_feature (527901)..(527901): n is a or c or g or t.
  misc_feature (527978)..(527978): n is a or c or g or t.
  misc_feature (960838)..(960839): n is a or c or g or t.
  misc_feature (960860)..(960861): n is a or c or g or t.
  misc_feature (960872)..(960873): n is a or c or g or t.
  misc_feature (960879)..(960879): n is a or c or g or t.
  misc_feature (960890)..(960890): n is a or c or g or t.
  misc_feature (1250239)..(1250239): n is a or c or g or t.
  misc_feature (1302432)..(1302434): n is a or c or g or t.
  misc_feature (1302471)..(1302471): n is a or c or g or t.
  misc_feature (1302488)..(1302488): n is a or c or g or t.
  misc_feature (1674836)..(1674836): n is a or c or g or t.
VHMHALTKRILGKISNN

SEQ ID NO: 1377 - protein, 442 aa, Thermococcus kodakaraensis KOD1
  misc_feature (321437)..(321437): n is a or c or g or t.
  misc_feature (527833)..(527833): n is a or c or g or t.
  misc_feature (527901)..(527901): n is a or c or g or t.
  misc_feature (527978)..(527978): n is a or c or g or t.
  misc_feature (960838)..(960839): n is a or c or g or t.
  misc_feature (960860)..(960861): n is a or c or g or t.
  misc_feature (960872)..(960873): n is a or c or g or t.
  misc_feature (960879)..(960879): n is a or c or g or t.
  misc_feature (960890)..(960890): n is a or c or g or t.
  misc_feature (1250239)..(1250239): n is a or c or g or t.
  misc_feature (1302432)..(1302434): n is a or c or g or t.
  misc_feature (1302471)..(1302471): n is a or c or g or t.
  misc_feature (1302488)..(1302488): n is a or c or g or t.
  misc_feature (1674836)..(1674836): n is a or c or g or t.
MVVGMKATTLGLITIPPILTGALAYSGQTALGLIGGIGAGALVAWYVDSRASASGKYMRLKEILRRMSRGEDVRIPPELADVRDYLLKLKPRAGEDTTILIQDLNRVLQGDLSAPVPSTSGLLKVYSDVKTKWKELMSEIQKTLHELQDAMKEIQDGTYSLEELENIYETLTDLINRLEDQSVKMAELNDHIQALSAAIEEISTQSQQVAEFTVESANAAEKGKEISDEAALKVEKINNVSKEMEKAVAILSDYSEKIGQIVDVITDIAEQTNLLALNAAIEAARAGEQGRGFAVVADSVRELAEQSRNSAKQIGDLIKEMQESVGKVVNSIHENTEATQEVAESIQELIAAFDDIARRANEIASMMNEISNGIDQQASSVQGLVSTVDYISAQNSEVVEQSQRVVEELSTVMDNVRSLKSGLGSLISKIGNLIGTLSNIKV

SEQ ID NO: 1378 - protein, 135 aa, Thermococcus kodakaraensis KOD1
  misc_feature (321437)..(321437): n is a or c or g or t.
  misc_feature (527833)..(527833): n is a or c or g or t.
  misc_feature (527901)..(527901): n is a or c or g or t.
  misc_feature (527978)..(527978): n is a or c or g or t.
  misc_feature (960838)..(960839): n is a or c or g or t.
  misc_feature (960860)..(960861): n is a or c or g or t.
  misc_feature (960872)..(960873): n is a or c or g or t.
  misc_feature (960879)..(960879): n is a or c or g or t.
  misc_feature (960890)..(960890): n is a or c or g or t.
  misc_feature (1250239)..(1250239): n is a or c or g or t.
  misc_feature (1302432)..(1302434): n is a or c or g or t.
  misc_feature (1302471)..(1302471): n is a or c or g or t.
  misc_feature (1302488)..(1302488): n is a or c or g or t.
  misc_feature (1674836)..(1674836): n is a or c or g or t.
MRHYELVKVKEDGKIEIPLELAYELGLVRGAYFLVEIDTDLKEAHLERIALPGKKLVEVELVVEDRPGVLAKISGLFGKHGINILFNESEELSELGLAAIVAIVDVSGSRISLEELKRALMGLKEVKELTLREVE

SEQ ID NO: 1379 - protein, 62 aa, Thermococcus kodakaraensis KOD1; identical to SEQ ID NO: 58
  misc_feature (321437)..(321437): n is a or c or g or t.
  misc_feature (527833)..(527833): n is a or c or g or t.
  misc_feature (527901)..(527901): n is a or c or g or t.
  misc_feature (527978)..(527978): n is a or c or g or t.
  misc_feature (960838)..(960839): n is a or c or g or t.
  misc_feature (960860)..(960861): n is a or c or g or t.
  misc_feature (960872)..(960873): n is a or c or g or t.
  misc_feature (960879)..(960879): n is a or c or g or t.
  misc_feature (960890)..(960890): n is a or c or g or t.
  misc_feature (1250239)..(1250239): n is a or c or g or t.
  misc_feature (1302432)..(1302434): n is a or c or g or t.
  misc_feature (1302471)..(1302471): n is a or c or g or t.
  misc_feature (1302488)..(1302488): n is a or c or g or t.
  misc_feature (1674836)..(1674836): n is a or c or g or t.

SEQ ID NO: 1380 - protein, 104 aa, Thermococcus kodakaraensis KOD1
  misc_feature (321437)..(321437): n is a or c or g or t.
  misc_feature (527833)..(527833): n is a or c or g or t.
  misc_feature (527901)..(527901): n is a or c or g or t.
  misc_feature (527978)..(527978): n is a or c or g or t.
  misc_feature (960838)..(960839): n is a or c or g or t.
  misc_feature (960860)..(960861): n is a or c or g or t.
  misc_feature (960872)..(960873): n is a or c or g or t.
  misc_feature (960879)..(960879): n is a or c or g or t.
  misc_feature (960890)..(960890): n is a or c or g or t.
  misc_feature (1250239)..(1250239): n is a or c or g or t.
  misc_feature (1302432)..(1302434): n is a or c or g or t.
  misc_feature (1302471)..(1302471): n is a or c or g or t.
  misc_feature (1302488)..(1302488): n is a or c or g or t.
  misc_feature (1674836)..(1674836): n is a or c or g or t.
VLAGAWYYIAWPMMTKEALAVGAVGGVLMHWALTNKGNKALVIIEPFTSSWRVLLYDMMLLSFLAALWQANGAALLDALKDSVENLALLLALLGGIGVDYGVEG

SEQ ID NO: 1381 - protein, 160 aa, Thermococcus kodakaraensis KOD1
  misc_feature (321437)..(321437): n is a or c or g or t.
  misc_feature (527833)..(527833): n is a or c or g or t.
  misc_feature (527901)..(527901): n is a or c or g or t.
  misc_feature (527978)..(527978): n is a or c or g or t.
  misc_feature (960838)..(960839): n is a or c or g or t.
  misc_feature (960860)..(960861): n is a or c or g or t.
  misc_feature (960872)..(960873): n is a or c or g or t.
  misc_feature (960879)..(960879): n is a or c or g or t.
  misc_feature (960890)..(960890): n is a or c or g or t.
  misc_feature (1250239)..(1250239): n is a or c or g or t.
  misc_feature (1302432)..(1302434): n is a or c or g or t.
  misc_feature (1302471)..(1302471): n is a or c or g or t.
  misc_feature (1302488)..(1302488): n is a or c or g or t.
  misc_feature (1674836)..(1674836): n is a or c or g or t.
MYAHRSTPSFSKVILRLFAVVSLIFLAYFSYSTFAEHDPLKERLYELGYPTEGFIFSNNTIRWADGHLTIVQGAYVEDYPVTAEQAYEIARQYLASYNKKLEKYNYKLYPDKKSLTEKEKDGQKYWVFELKLDTGGSKLFAGFIWVNRKTGAVSVKGLLG

SEQ ID NO: 1382 - protein, 266 aa, Thermococcus kodakaraensis KOD1
  misc_feature (321437)..(321437): n is a or c or g or t.
  misc_feature (527833)..(527833): n is a or c or g or t.
  misc_feature (527901)..(527901): n is a or c or g or t.
  misc_feature (527978)..(527978): n is a or c or g or t.
  misc_feature (960838)..(960839): n is a or c or g or t.
  misc_feature (960860)..(960861): n is a or c or g or t.
  misc_feature (960872)..(960873): n is a or c or g or t.
  misc_feature (960879)..(960879): n is a or c or g or t.
  misc_feature (960890)..(960890): n is a or c or g or t.
  misc_feature (1250239)..(1250239): n is a or c or g or t.
  misc_feature (1302432)..(1302434): n is a or c or g or t.
  misc_feature (1302471)..(1302471): n is a or c or g or t.
  misc_feature (1302488)..(1302488): n is a or c or g or t.
  misc_feature (1674836)..(1674836): n is a or c or g or t.
MKRLVFAFILFLLTASLASGGTLYDWSGSLSVGERVYINDLSLLVDKNIKTNETVLVIEQDSQIQTILGDGENYTTKGLEILFAALGDEGYVHVESEKPFAVSFSAPDEAAELRNENTELREKLANLTTKYNKLAKENEQLKQQVSELQSKLKNQPNTAELNAKILNLTRENRELKAQLANLTNQYNAVKAKADFLEQQNDEYRKMIQTLLEDASQKSEQSYIEKAKKEKLVGSVIIKAIAFSVIVVGLIGYGLYRKKRSWELGGL

SEQ ID NO: 1383 - protein, 126 aa, Thermococcus kodakaraensis KOD1
  misc_feature (321437)..(321437): n is a or c or g or t.
  misc_feature (527833)..(527833): n is a or c or g or t.
  misc_feature (527901)..(527901): n is a or c or g or t.
  misc_feature (527978)..(527978): n is a or c or g or t.
  misc_feature (960838)..(960839): n is a or c or g or t.
  misc_feature (960860)..(960861): n is a or c or g or t.
  misc_feature (960872)..(960873): n is a or c or g or t.
  misc_feature (960879)..(960879): n is a or c or g or t.
  misc_feature (960890)..(960890): n is a or c or g or t.
  misc_feature (1250239)..(1250239): n is a or c or g or t.
  misc_feature (1302432)..(1302434): n is a or c or g or t.
  misc_feature (1302471)..(1302471): n is a or c or g or t.
  misc_feature (1302488)..(1302488): n is a or c or g or t.
  misc_feature (1674836)..(1674836): n is a or c or g or t.
VGKSPPTAIIRVPKKIAYFGDETITILASAFIMNEYYEYEAIPLALDETDAKLYLALKKENDMLWDLITILRYRVPEVVEDAMKMNPRIKTYMSTKQQNPDEGTKEEKFGGIEVAFEDNPFKRWRV

SEQ ID NO: 1384 - protein, 238 aa, Thermococcus kodakaraensis KOD1
  misc_feature (321437)..(321437): n is a or c or g or t.
  misc_feature (527833)..(527833): n is a or c or g or t.
  misc_feature (527901)..(527901): n is a or c or g or t.
  misc_feature (527978)..(527978): n is a or c or g or t.
  misc_feature (960838)..(960839): n is a or c or g or t.
  misc_feature (960860)..(960861): n is a or c or g or t.
  misc_feature (960872)..(960873): n is a or c or g or t.
  misc_feature (960879)..(960879): n is a or c or g or t.
  misc_feature (960890)..(960890): n is a or c or g or t.
  misc_feature (1250239)..(1250239): n is a or c or g or t.
  misc_feature (1302432)..(1302434): n is a or c or g or t.
  misc_feature (1302471)..(1302471): n is a or c or g or t.
  misc_feature (1302488)..(1302488): n is a or c or g or t.
  misc_feature (1674836)..(1674836): n is a or c or g or t.
MHISFKDVYLRSISIKHDETAFSTEEEKKENKVSKLRIDGSGELVKDLLEIVEEHEKFRYMTRLTKIGIKLVEKEYPDKFVLEDLYYWGKFTAKGTSFDEHLEFIDSVVHTYRNNLKYIEDSLIDYSSWDWEKKIPLVYEFKKEISDLDLFAKAITTPKEPFRIWGFAKQVEKDMYIIVGTDLHNGDNFSLEVTPWWARLYLPKGSCGNTALRLLANIQQTYDAKAYLEVPQYGIRIR

SEQ ID NO: 1385 - protein, 140 aa, Thermococcus kodakaraensis KOD1
  misc_feature (321437)..(321437): n is a or c or g or t.
  misc_feature (527833)..(527833): n is a or c or g or t.
  misc_feature (527901)..(527901): n is a or c or g or t.
  misc_feature (527978)..(527978): n is a or c or g or t.
  misc_feature (960838)..(960839): n is a or c or g or t.
  misc_feature (960860)..(960861): n is a or c or g or t.
  misc_feature (960872)..(960873): n is a or c or g or t.
  misc_feature (960879)..(960879): n is a or c or g or t.
  misc_feature (960890)..(960890): n is a or c or g or t.
  misc_feature (1250239)..(1250239): n is a or c or g or t.
  misc_feature (1302432)..(1302434): n is a or c or g or t.
  misc_feature (1302471)..(1302471): n is a or c or g or t.
  misc_feature (1302488)..(1302488): n is a or c or g or t.
  misc_feature (1674836)..(1674836): n is a or c or g or t.
MTEQDHQEAKVVEPLAKFQSRVRPQGRVMVPIYIREYFGLQDGDFVIVIIRIPDQNRKIIGRVFAVAKLYDRGVFTIPKPVRDRFGLKVGDFVEILLVDYIHVKSLITNKMGPTLSPKSQFEAIDEQQERKILERIYNND

SEQ ID NO: 1386 - protein, 268 aa, Thermococcus kodakaraensis KOD1
  misc_feature (321437)..(321437): n is a or c or g or t.
  misc_feature (527833)..(527833): n is a or c or g or t.
  misc_feature (527901)..(527901): n is a or c or g or t.
  misc_feature (527978)..(527978): n is a or c or g or t.
  misc_feature (960838)..(960839): n is a or c or g or t.
  misc_feature (960860)..(960861): n is a or c or g or t.
  misc_feature (960872)..(960873): n is a or c or g or t.
  misc_feature (960879)..(960879): n is a or c or g or t.
  misc_feature (960890)..(960890): n is a or c or g or t.
  misc_feature (1250239)..(1250239): n is a or c or g or t.
  misc_feature (1302432)..(1302434): n is a or c or g or t.
  misc_feature (1302471)..(1302471): n is a or c or g or t.
  misc_feature (1302488)..(1302488): n is a or c or g or t.
  misc_feature (1674836)..(1674836): n is a or c or g or t.
VRRALLFIFFRGGDGMTFEIVFDSAREFESLIATLEKFFDEAVFQVNMEGIQMRAIDPSRVVLVDLNLPEMLFSKYSVESEEAIAFDLKRFLKVLKLARSRDTLVLRKGGENFLEVGLLGDENTWFKLPLIDANTPEIEIPSLPWTVKAVVLAGALKRAVKAAKLVSDSIYFMATPEKLTFKAEGNDSEVRTVLTMEDPGLLDLEHKMTKAKSAYGVAYLEDILRSLADADEVIIRFGFDIPLLLKYMVRDAGEVSFLIAPRVEEGRS

SEQ ID NO: 1387 - protein, 104 aa, Thermococcus kodakaraensis KOD1
  misc_feature (321437)..(321437): n is a or c or g or t.
  misc_feature (527833)..(527833): n is a or c or g or t.
  misc_feature (527901)..(527901): n is a or c or g or t.
  misc_feature (527978)..(527978): n is a or c or g or t.
  misc_feature (960838)..(960839): n is a or c or g or t.
  misc_feature (960860)..(960861): n is a or c or g or t.
  misc_feature (960872)..(960873): n is a or c or g or t.
  misc_feature (960879)..(960879): n is a or c or g or t.
  misc_feature (960890)..(960890): n is a or c or g or t.
  misc_feature (1250239)..(1250239): n is a or c or g or t.
  misc_feature (1302432)..(1302434): n is a or c or g or t.
  misc_feature (1302471)..(1302471): n is a or c or g or t.
  misc_feature (1302488)..(1302488): n is a or c or g or t.
  misc_feature (1674836)..(1674836): n is a or c or g or t.
MTEYLIIIDGEQFVTEAPHVLAAWEVAIAQAALMLHEGRLRSEDVEIHVFSEREAKREGVPILFPKRLNRLEVLQKVEDLREELRRVRPHEGQATLEQFVGVRA

SEQ ID NO: 1388 - protein, 375 aa, Thermococcus kodakaraensis KOD1
  misc_feature (321437)..(321437): n is a or c or g or t.
  misc_feature (527833)..(527833): n is a or c or g or t.
  misc_feature (527901)..(527901): n is a or c or g or t.
  misc_feature (527978)..(527978): n is a or c or g or t.
  misc_feature (960838)..(960839): n is a or c or g or t.
  misc_feature (960860)..(960861): n is a or c or g or t.
  misc_feature (960872)..(960873): n is a or c or g or t.
  misc_feature (960879)..(960879): n is a or c or g or t.
  misc_feature (960890)..(960890): n is a or c or g or t.
  misc_feature (1250239)..(1250239): n is a or c or g or t.
  misc_feature (1302432)..(1302434): n is a or c or g or t.
  misc_feature (1302471)..(1302471): n is a or c or g or t.
  misc_feature (1302488)..(1302488): n is a or c or g or t.
  misc_feature (1674836)..(1674836): n is a or c or g or t.
MDIERKIELIKKKPTEELLTEENLRHLLEVGAPLQHYIGFEISGYIHLGTGLMAGAKIADLQKAGVKTRIFLADWHSWINDKLGGDLEVIQKVALTYFKEGMKQSIKVMGGDPDKVEFVLASEILDKGDYWQTVIDISKNVTLARMLRSITIMGRQMGEAIDFAKLIYPAMQVADIFYQGVTIAHAGMDQRKAHVIAIEVAQKLKYHPLEWKGEKLKPVALHHHLLLGLQEPPVWPIESEEQFKELKTQMKMSKSKPYSAVFIHDSPEEIKQKLRKAFCPAREVKYNPVLDWAEYIIFREEPTEFTIHRPAKFGGDVTYTTFEELKKDFAEGKLHPLDLKNAVAEYLIELLKPVREYFEKHPEPLELMREIKITR

SEQ ID NO: 1389 - protein, 832 aa, Thermococcus kodakaraensis KOD1
  misc_feature (321437)..(321437): n is a or c or g or t.
  misc_feature (527833)..(527833): n is a or c or g or t.
  misc_feature (527901)..(527901): n is a or c or g or t.
  misc_feature (527978)..(527978): n is a or c or g or t.
  misc_feature (960838)..(960839): n is a or c or g or t.
  misc_feature (960860)..(960861): n is a or c or g or t.
  misc_feature (960872)..(960873): n is a or c or g or t.
  misc_feature (960879)..(960879): n is a or c or g or t.
  misc_feature (960890)..(960890): n is a or c or g or t.
  misc_feature (1250239)..(1250239): n is a or c or g or t.
  misc_feature (1302432)..(1302434): n is a or c or g or t.
  misc_feature (1302471)..(1302471): n is a or c or g or t.
  misc_feature (1302488)..(1302488): n is a or c or g or t.
  misc_feature (1674836)..(1674836): n is a or c or g or t.
MLFVVRPGRKKNELEAFFIENEPEKLSQMQNLKADRIYRFIMREGRLFKVLEGSQYRNPKEIEKLLRQSRIVLVNADEWEDYFKRRLQNKRVEKAELCRLCLLEGRITVLTEGNRIKYHNEYICERCAEDELKRELRFRFKSIAMFDQAKKLLERFRDLDKVLYAFDPRFDPTKHPEITKWDELKAKHVKVEKIKVDELPVPEKFKEVLKSEGVRELLPVQSLAVKNGLLDGENLLVVSATASGKTLIGELAGVPKAMQGKKLLFLVPLVALANQKYEDFKRRYSKLGLRVAIRVGMSRIKTKDELVVVDTGIDADIIVGTYEGIDYLLRAGRKIGNVGTIVIDEIHTLDDEERGPRLDGLIARLRKLYPKAQFIGLSATVGNPDELAKELGLKLVLYDERPVDLERHIIIVRNESEKWRHIANLCRAEAMRKSKQGYKGQSIVFTFSRKRTHELAAYLTSKGLKAKPYHSGLPYKQRKLTEMEFLAQRLDVVVTTAALGAGVDFPASQVIFESLAMGNKWLSVREFHQMLGRAGRPLYHEKGKVYLLVEPGRKYSAQMEGTEDEVAFKLLTAPIEPVQVEWSDELEQDNVLAHSCVFNRLDVIEEVQSMCLGANQSAEKVLEKLEEFDFVKMKRPIVEVTPYGRAVSMSFLLPKEATFIRGNLGKREARWIAVKLLPFENIYLSGTLQRELEGAVRGRLSANVFSPSFASILEELDKVIPELSPNAAERLFTIYQEFFMCPEEDCTEYAMERVSNLIIELRRSGKHPTQIAEHFRKVYGLIVYPGDVFTWLDGIVRKLEAIERIARVFRVRKTEEGAKILKREIEEGRMIR

SEQ ID NO: 1390 - protein, 177 aa, Thermococcus kodakaraensis KOD1
  misc_feature (321437)..(321437): n is a or c or g or t.
  misc_feature (527833)..(527833): n is a or c or g or t.
  misc_feature (527901)..(527901): n is a or c or g or t.
  misc_feature (527978)..(527978): n is a or c or g or t.
  misc_feature (960838)..(960839): n is a or c or g or t.
  misc_feature (960860)..(960861): n is a or c or g or t.
  misc_feature (960872)..(960873): n is a or c or g or t.
  misc_feature (960879)..(960879): n is a or c or g or t.
  misc_feature (960890)..(960890): n is a or c or g or t.
  misc_feature (1250239)..(1250239): n is a or c or g or t.
  misc_feature (1302432)..(1302434): n is a or c or g or t.
  misc_feature (1302471)..(1302471): n is a or c or g or t.
  misc_feature (1302488)..(1302488): n is a or c or g or t.
  misc_feature (1674836)..(1674836): n is a or c or g or t.
MAEITVGQVVKRKAVLVRPDDTIHKVARILARNKVGSAVVVDENEEIVGIITDRDILDKVVAKGKDPKKVLVKDVMTTKPVTIEDDYTIQDAIDKMMDKGIRRLLVTRVGKPIGFVTAADLLAALNSMNSEEEEEVEEETEVYGICEVCGQYGPLYKVYIEGGEKWVCESCKDELNL

SEQ ID NO: 1391 - protein, 51 aa, Thermococcus kodakaraensis KOD1
  misc_feature (321437)..(321437): n is a or c or g or t.
  misc_feature (527833)..(527833): n is a or c or g or t.
  misc_feature (527901)..(527901): n is a or c or g or t.
  misc_feature (527978)..(527978): n is a or c or g or t.
  misc_feature (960838)..(960839): n is a or c or g or t.
  misc_feature (960860)..(960861): n is a or c or g or t.
  misc_feature (960872)..(960873): n is a or c or g or t.
  misc_feature (960879)..(960879): n is a or c or g or t.
  misc_feature (960890)..(960890): n is a or c or g or t.
  misc_feature (1250239)..(1250239): n is a or c or g or t.
  misc_feature (1302432)..(1302434): n is a or c or g or t.
  misc_feature (1302471)..(1302471): n is a or c or g or t.
  misc_feature (1302488)..(1302488): n is a or c or g or t.
  misc_feature (1674836)..(1674836): n is a or c or g or t.
MEKVGSSNITTAEEGSKLTLAKKQKIRKFRGILGKASEETILWAIKEAEEL

SEQ ID NO: 1392 - protein, 449 aa, Thermococcus kodakaraensis KOD1
  misc_feature (321437)..(321437): n is a or c or g or t.
  misc_feature (527833)..(527833): n is a or c or g or t.
  misc_feature (527901)..(527901): n is a or c or g or t.
  misc_feature (527978)..(527978): n is a or c or g or t.
  misc_feature (960838)..(960839): n is a or c or g or t.
  misc_feature (960860)..(960861): n is a or c or g or t.
  misc_feature (960872)..(960873): n is a or c or g or t.
  misc_feature (960879)..(960879): n is a or c or g or t.
  misc_feature (960890)..(960890): n is a or c or g or t.
  misc_feature (1250239)..(1250239): n is a or c or g or t.
  misc_feature (1302432)..(1302434): n is a or c or g or t.
  misc_feature (1302471)..(1302471): n is a or c or g or t.
  misc_feature (1302488)..(1302488): n is a or c or g or t.
  misc_feature (1674836)..(1674836): n is a or c or g or t.
MSMKVAGFLLIFLLMVASAGCVGQNSSTAQTGSQGPPTSSAEKGAGSDITQGDQTSQTSSTQSQTTSSSSSETSTTPRGTSTKTESREITVTFIVSVPGYTPEDDAVYIAGDFNGWNPGDENYRLTKLPDGRWAINLTFPYGKVIEFKFTRGSWETVEKGPNGEEIPNRQFVFKDSGTYEFTVYHWRDYVEEVGVGEHTITGNVTTFKMVIPQLNRTRRIWIYLPPDYGTTNRSYPVLYMFDGQNLFDSATSFAGEWGVDEALEKLYTERGFSIIVVGIDNGGDKRIDEYAPWVNEEYGRGGEGDAMVRFIVETLKPYIDSHYRTVPNETGIMGSSLGGLMAVYAGFAYPEVFRYVGAMSSAFWFNPEIYDFVRNAEKGPEKIYIDWGTMEGSDPGAFSRSNEEMVSILKEKGYVEGVNLKVVIDEGAQHNEYYWGKRFPDAVLWLFEG

SEQ ID NO: 1393 - protein, 900 aa, Thermococcus kodakaraensis KOD1
  misc_feature (321437)..(321437): n is a or c or g or t.
  misc_feature (527833)..(527833): n is a or c or g or t.
  misc_feature (527901)..(527901): n is a or c or g or t.
  misc_feature (527978)..(527978): n is a or c or g or t.
  misc_feature (960838)..(960839): n is a or c or g or t.
  misc_feature (960860)..(960861): n is a or c or g or t.
  misc_feature (960872)..(960873): n is a or c or g or t.
  misc_feature (960879)..(960879): n is a or c or g or t.
  misc_feature (960890)..(960890): n is a or c or g or t.
  misc_feature (1250239)..(1250239): n is a or c or g or t.
  misc_feature (1302432)..(1302434): n is a or c or g or t.
  misc_feature (1302471)..(1302471): n is a or c or g or t.
  misc_feature (1302488)..(1302488): n is a or c or g or t.
  misc_feature (1674836)..(1674836): n is a or c or g or t.
MSLFEVLKPLKSEIARVHVFPPREGEFGEFAFKNPEINALVEELGFSLYRHQVEALEKLYAGKNIVVTTPTASGKSEIFRLAIFDSYLLDPRKTYLLVYPTRALINNQLEKFQRANLSFYRITGKLVPAKILTGDVPWEERRRLLRERPRVVFTTPDMLHYNILRRWREYEWLLRNLRYLVVDELHVYRGVFGSNAAWLFRRLSFRLKRLGVKPQIIALSATLRNPKEFAEKLFRTEFEPITHATNPFPRRYLVLFEPKNLGDKQLLRAVIERLVSKRIKTLVFFDSRKGTEKTLRFLLNSPVFSKVTTYKGTLPKNVRWEVERDFRDGKLLALLTTNALELGIDIGDLDAVINYGIPPDGLFSLIQRFGRAGRSADREALNGVVLRKNGLDYYYREHFNELVERLEKGIIEYMPVKTDNERIAEKHLHYLLTELGIVDWDELDEFERRIAEKLVVERKADLKKNPLTGKLEVRVRRPAFEYSSLRTASDESFFLVKDEPWIRAKLMEKSSLRELLNFINWLKMKGHIIEEVDEDEYHRSLLPGMAYFSRGELYMAMERLSIGKFHFVFAKQLNRLWDVETFARKLEEVEILEERAKKAYKGVEIGLGRLRVRHVYTGFAVKGLDTGNYVEELVRLKEAGILKGEISSPATGERVETEEDFSILNWEKFAKVEFEEPYVREFETEGIWLVFPEEIRELTEEEFREFFGRATEKGFEDLAFQIYESLDRRKLFPLYLGATSFIIRKAIGDALQKAGIQNEELAFAVKKMVDSKDGIGSALHAIEHNMIKIAPIFTYVDSRELGGYSYESFPGTPYFGKPVVFIYDGNEGGAGLAGIIYENAEKLMEKSLEHLKSCKCQDGCPVCVLSPKCGTFNEFLDKWAAIKVWERILKGNKADAQDPF

SEQ ID NO: 1394 - protein, 235 aa, Thermococcus kodakaraensis KOD1
  misc_feature (321437)..(321437): n is a or c or g or t.
  misc_feature (527833)..(527833): n is a or c or g or t.
  misc_feature (527901)..(527901): n is a or c or g or t.
  misc_feature (527978)..(527978): n is a or c or g or t.
  misc_feature (960838)..(960839): n is a or c or g or t.
  misc_feature (960860)..(960861): n is a or c or g or t.
  misc_feature (960872)..(960873): n is a or c or g or t.
  misc_feature (960879)..(960879): n is a or c or g or t.
  misc_feature (960890)..(960890): n is a or c or g or t.
  misc_feature (1250239)..(1250239): n is a or c or g or t.
  misc_feature (1302432)..(1302434): n is a or c or g or t.
  misc_feature (1302471)..(1302471): n is a or c or g or t.
  misc_feature (1302488)..(1302488): n is a or c or g or t.
  misc_feature (1674836)..(1674836): n is a or c or g or t.
MEYIGFTYVSNFVSERVEEALFEAYNDVNRLLEEWRLPIRLVYLDKLILEPGYLITLETPEGKVRLFPLDVLVDFMDYRLKVELEKNDGLNMNKIFGITSFPLASRDKYFGFYEKFLGFQTERLGRRVMLLSMRPFESDSMRMALKILDNPLADDDLRSLAERVLSRELPAFKTRLIKGMLHEIGHSFGLEHCPNDCVMNPPQTLEEWDSRFLGYCDSCRRKLERNLLADTKGKD

SEQ ID NO: 1395 - protein, 170 aa, Thermococcus kodakaraensis KOD1
  misc_feature (321437)..(321437): n is a or c or g or t.
  misc_feature (527833)..(527833): n is a or c or g or t.
  misc_feature (527901)..(527901): n is a or c or g or t.
  misc_feature (527978)..(527978): n is a or c or g or t.
  misc_feature (960838)..(960839): n is a or c or g or t.
  misc_feature (960860)..(960861): n is a or c or g or t.
  misc_feature (960872)..(960873): n is a or c or g or t.
  misc_feature (960879)..(960879): n is a or c or g or t.
  misc_feature (960890)..(960890): n is a or c or g or t.
  misc_feature (1250239)..(1250239): n is a or c or g or t.
  misc_feature (1302432)..(1302434): n is a or c or g or t.
  misc_feature (1302471)..(1302471): n is a or c or g or t.
  misc_feature (1302488)..(1302488): n is a or c or g or t.
  misc_feature (1674836)..(1674836): n is a or c or g or t.
MNYTNVGGRSMVQLDDLDRAILKLLKQDARLTISELAERLNRPESTIHFRIKKLIEKGVIDRYTIILGEPLKPKSVVAVYIETEIPVIEDFLEKYINHITKTLSMLPNVLAVARSGRNGIIALIGGETEEQIEKFVDDTIRTLPSLRKVEVFPFTNIVKGEDVIGFLVDV

SEQ ID NO: 1396 - protein, 55 aa, Thermococcus kodakaraensis KOD1
  misc_feature (321437)..(321437): n is a or c or g or t.
  misc_feature (527833)..(527833): n is a or c or g or t.
  misc_feature (527901)..(527901): n is a or c or g or t.
  misc_feature (527978)..(527978): n is a or c or g or t.
  misc_feature (960838)..(960839): n is a or c or g or t.
  misc_feature (960860)..(960861): n is a or c or g or t.
  misc_feature (960872)..(960873): n is a or c or g or t.
  misc_feature (960879)..(960879): n is a or c or g or t.
  misc_feature (960890)..(960890): n is a or c or g or t.
  misc_feature (1250239)..(1250239): n is a or c or g or t.
  misc_feature (1302432)..(1302434): n is a or c or g or t.
  misc_feature (1302471)..(1302471): n is a or c or g or t.
  misc_feature (1302488)..(1302488): n is a or c or g or t.
  misc_feature (1674836)..(1674836): n is a or c or g or t.
VDMLTGHFIAVKKNGRWLVVVYDAAHEGIEVVTVYEVSRKTQIERRIKKGRWVEV

SEQ ID NO: 1397 - protein, 111 aa, Thermococcus kodakaraensis KOD1
  misc_feature (321437)..(321437): n is a or c or g or t.
  misc_feature (527833)..(527833): n is a or c or g or t.
  misc_feature (527901)..(527901): n is a or c or g or t.
  misc_feature (527978)..(527978): n is a or c or g or t.
  misc_feature (960838)..(960839): n is a or c or g or t.
  misc_feature (960860)..(960861): n is a or c or g or t.
  misc_feature (960872)..(960873): n is a or c or g or t.
  misc_feature (960879)..(960879): n is a or c or g or t.
  misc_feature (960890)..(960890): n is a or c or g or t.
  misc_feature (1250239)..(1250239): n is a or c or g or t.
  misc_feature (1302432)..(1302434): n is a or c or g or t.
  misc_feature (1302471)..(1302471): n is a or c or g or t.
  misc_feature (1302488)..(1302488): n is a or c or g or t.
  misc_feature (1674836)..(1674836): n is a or c or g or t.
VKGPTEEEIRNVIMPLMLSGAKMLDRHCPRCGSPLFEKDGRVFCPVCEYRERKRKAEMKEEVKDVEERLREKLTQLANSLPEDIEELEKHLRVMEKIIDLLERYKRLEGSE

SEQ ID NO: 1398 - protein, 235 aa, Thermococcus kodakaraensis KOD1
  misc_feature (321437)..(321437): n is a or c or g or t.
  misc_feature (527833)..(527833): n is a or c or g or t.
  misc_feature (527901)..(527901): n is a or c or g or t.
  misc_feature (527978)..(527978): n is a or c or g or t.
  misc_feature (960838)..(960839): n is a or c or g or t.
  misc_feature (960860)..(960861): n is a or c or g or t.
  misc_feature (960872)..(960873): n is a or c or g or t.
  misc_feature (960879)..(960879): n is a or c or g or t.
  misc_feature (960890)..(960890): n is a or c or g or t.
  misc_feature (1250239)..(1250239): n is a or c or g or t.
  misc_feature (1302432)..(1302434): n is a or c or g or t.
  misc_feature (1302471)..(1302471): n is a or c or g or t.
  misc_feature (1302488)..(1302488): n is a or c or g or t.
  misc_feature (1674836)..(1674836): n is a or c or g or t.
VIGMDRIAKAREIIEKAKAENRPLVEPEAKEILRLYGVPVPDFKVATNEEEAVKFAREIGYPVVMKIVSPQIIHKSDAGGVKVNIKNDEEARQAFRTIMENARNYKPDADLWGVIIYRMLPLGKEVIVGMIRDPQFGPAIMFGLGGIFVEILKDVSFRVAPISKDEALEMIKEIKAYPILAGARGEKPVDIEALADIIVKVGELALELPEIRELDINPIFAYEDGAVAVDARMLL

SEQ ID NO: 1399 - protein, 205 aa, Thermococcus kodakaraensis KOD1
  misc_feature (321437)..(321437): n is a or c or g or t.
  misc_feature (527833)..(527833): n is a or c or g or t.
  misc_feature (527901)..(527901): n is a or c or g or t.
  misc_feature (527978)..(527978): n is a or c or g or t.
  misc_feature (960838)..(960839): n is a or c or g or t.
  misc_feature (960860)..(960861): n is a or c or g or t.
  misc_feature (960872)..(960873): n is a or c or g or t.
  misc_feature (960879)..(960879): n is a or c or g or t.
  misc_feature (960890)..(960890): n is a or c or g or t.
  misc_feature (1250239)..(1250239): n is a or c or g or t.
  misc_feature (1302432)..(1302434): n is a or c or g or t.
  misc_feature (1302471)..(1302471): n is a or c or g or t.
  misc_feature (1302488)..(1302488): n is a or c or g or t.
  misc_feature (1674836)..(1674836): n is a or c or g or t.
MGERRELAEDKSSLLGRGKGFFYFSTVVPEIAEAFIGGLLQNPEVELWREKFTVEEVKALAEPERLSGKKFVTLSPIAVTTKRIQFGKPRSYDLSPREPEFYELVRENLREKYVLIYGSKPPEDFEMRVLNAKPKRFEVKPGIFQIAWHLVFRAYGDEGLLRTGYLAGFGEKNSIGFGMVKVDARKERVKKKWKGGADHQKGKEA

SEQ ID NO: 1400 - protein, 358 aa, Thermococcus kodakaraensis KOD1
  misc_feature (321437)..(321437): n is a or c or g or t.
  misc_feature (527833)..(527833): n is a or c or g or t.
  misc_feature (527901)..(527901): n is a or c or g or t.
  misc_feature (527978)..(527978): n is a or c or g or t.
  misc_feature (960838)..(960839): n is a or c or g or t.
  misc_feature (960860)..(960861): n is a or c or g or t.
  misc_feature (960872)..(960873): n is a or c or g or t.
  misc_feature (960879)..(960879): n is a or c or g or t.
  misc_feature (960890)..(960890): n is a or c or g or t.
  misc_feature (1250239)..(1250239): n is a or c or g or t.
  misc_feature (1302432)..(1302434): n is a or c or g or t.
  misc_feature (1302471)..(1302471): n is a or c or g or t.
  misc_feature (1302488)..(1302488): n is a or c or g or t.
  misc_feature (1674836)..(1674836): n is a or c or g or t.
MRFATGLVLIDAPHSALNMLGIDESLADRNVTRVKTFKRGGKRYPYVSSQAWRYWWRSTLKEHFNWELSPLYREQKQVFTAANPLKYPDDDVFGYMRAFKKGGVNVTVTRVSPLKNTPLISVLPDRNSLTVDEGYASRHEGDPVPYSQEFYSTVFKGAFSLDLDAVGRFTIISKAGFKNLLTREDLPKNRNKNNEEIFQEVEEMEKLAKELGVQMNEKEWVMPSEIRKKRASEAIKALRLLSGGAKQTQYHTDITPKFVLLLNVEAGINPFISDVVFEDKGDIKFDAEALSKRLGDLRDVIPEGAKLYLGYDEGFVKSLGWDMNDIVQKLEESGIEVFLGTVKEAIEEFVKEVEAYYG

SEQ ID NO: 1401 - protein, 369 aa, Thermococcus kodakaraensis KOD1
  misc_feature (321437)..(321437): n is a or c or g or t.
  misc_feature (527833)..(527833): n is a or c or g or t.
  misc_feature (527901)..(527901): n is a or c or g or t.
  misc_feature (527978)..(527978): n is a or c or g or t.
  misc_feature (960838)..(960839): n is a or c or g or t.
  misc_feature (960860)..(960861): n is a or c or g or t.
  misc_feature (960872)..(960873): n is a or c or g or t.
  misc_feature (960879)..(960879): n is a or c or g or t.
  misc_feature (960890)..(960890): n is a or c or g or t.
  misc_feature (1250239)..(1250239): n is a or c or g or t.
  misc_feature (1302432)..(1302434): n is a or c or g or t.
  misc_feature (1302471)..(1302471): n is a or c or g or t.
  misc_feature (1302488)..(1302488): n is a or c or g or t.
  misc_feature (1674836)..(1674836): n is a or c or g or t.
MENPFRYGEPVVGKDFADRKKELEELKMEMLSGQNVIIYSPRRFGKSSLVYNAILSLGDRIVPLWIDCYGVLTKKEFAEKIASESLKHLKFQNLLKSAKRLFKKVTPKIRLGDALEVEFTFGEEETAFEESLELPQRLAEHLEKRVVVVFDEFQEVAELGEDVLKKMRSKFQWQRDVAFVFIGSRRSMMERIFRSAQSPFYNFGRHMVLGKIPKDEFKEFILEKFKETGIEVRENIVDMVLELTGGHPYYTQKFCHRLWYVGKLKGSLEMEDVEKTFEELVKESEASYIEIWDSLPLSQRKVLLAIARGEKDLYSSEFLIRYRFSSASSVQYSIKALREKELIHRINGEFEISDPFLHHWLLWRFGSGR

SEQ ID NO: 1402 - protein, 75 aa, Thermococcus kodakaraensis KOD1
  misc_feature (321437)..(321437): n is a or c or g or t.
  misc_feature (527833)..(527833): n is a or c or g or t.
  misc_feature (527901)..(527901): n is a or c or g or t.
  misc_feature (527978)..(527978): n is a or c or g or t.
  misc_feature (960838)..(960839): n is a or c or g or t.
  misc_feature (960860)..(960861): n is a or c or g or t.
  misc_feature (960872)..(960873): n is a or c or g or t.
  misc_feature (960879)..(960879): n is a or c or g or t.
  misc_feature (960890)..(960890): n is a or c or g or t.
  misc_feature (1250239)..(1250239): n is a or c or g or t.
  misc_feature (1302432)..(1302434): n is a or c or g or t.
  misc_feature (1302471)..(1302471): n is a or c or g or t.
  misc_feature (1302488)..(1302488): n is a or c or g or t.
  misc_feature (1674836)..(1674836): n is a or c or g or t.
MPVTKVTRNYQITLPAEIRKALGIEEGELLEVELEGEKIVVKRLKRRRKTLKLGERLTPEEIEKVIEEGMEECMQ

SEQ ID NO: 1403 - protein, 377 aa, Thermococcus kodakaraensis KOD1
  misc_feature (321437)..(321437): n is a or c or g or t.
  misc_feature (527833)..(527833): n is a or c or g or t.
  misc_feature (527901)..(527901): n is a or c or g or t.
  misc_feature (527978)..(527978): n is a or c or g or t.
  misc_feature (960838)..(960839): n is a or c or g or t.
  misc_feature (960860)..(960861): n is a or c or g or t.
  misc_feature (960872)..(960873): n is a or c or g or t.
  misc_feature (960879)..(960879): n is a or c or g or t.
  misc_feature (960890)..(960890): n is a or c or g or t.
  misc_feature (1250239)..(1250239): n is a or c or g or t.
  misc_feature (1302432)..(1302434): n is a or c or g or t.
  misc_feature (1302471)..(1302471): n is a or c or g or t.
  misc_feature (1302488)..(1302488): n is a or c or g or t.
  misc_feature (1674836)..(1674836): n is a or c or g or t.
MSWVVMDAGIEPDEEELADTLEGALKSLGSRVKIHTSKMGRNDRSSFDKVLKAWFGRSAPETYGELFELVVTETIKLLRDGNIDPGESLSTIKTDKNGTYLGIAYNGEQAILPAIIKQPEYYERQSGFLSPTTGQKAQIRMDPLWFSFMALGFFTSFAGFIGGKYYLMTKPGIEVFWPYEVEEIIEKGILPLTGAGASGRISLSTEELYEMKLAMKLAEEGRDVIEEVYPVTLHLISLEGQVYTELKTTQLNLTGLSEYMEEYVNRIESASMGGLPILVELKAGNATIQKYPLWALVDIAERELWKGVNGDGEMLAYIFVKDLYRAINSGRRELIRDAVFRLFRQGRALLEGSGRASGEFRKVMKTFMWQEHLEVLL

SEQ ID NO: 1404 - protein, 257 aa, Thermococcus kodakaraensis KOD1
  misc_feature (321437)..(321437): n is a or c or g or t.
  misc_feature (527833)..(527833): n is a or c or g or t.
  misc_feature (527901)..(527901): n is a or c or g or t.
  misc_feature (527978)..(527978): n is a or c or g or t.
  misc_feature (960838)..(960839): n is a or c or g or t.
  misc_feature (960860)..(960861): n is a or c or g or t.
  misc_feature (960872)..(960873): n is a or c or g or t.
  misc_feature (960879)..(960879): n is a or c or g or t.
  misc_feature (960890)..(960890): n is a or c or g or t.
  misc_feature (1250239)..(1250239): n is a or c or g or t.
  misc_feature (1302432)..(1302434): n is a or c or g or t.
  misc_feature (1302471)..(1302471): n is a or c or g or t.
  misc_feature (1302488)..(1302488): n is a or c or g or t.
  misc_feature (1674836)..(1674836): n is a or c or g or t.
MRIKLLLRFKPPFLIPYNYPRYLYSFLLRAIELADKEVAGRIHNNKRDIKFVASKFMPIGSTKRLEQGLLVESGTVELYVGSTEDIILESLVRGLGQGVGMLHVRGQRLLSYEAELEEIPKHLSGKRFKTLSPVSVYHNNPPNGFRQWDLSPVGPPNSPFENEPKVWKELLFENLKSKYMMVYGEPYEGSFDIRVLTKKPKSRRLLVKIDERTGKPIYARVWEFDFKMWGEEELLRVAYELGIGMRNPHGFGMVEVI

SEQ ID NO: 1405 - protein, 233 aa, Thermococcus kodakaraensis KOD1
  misc_feature (321437)..(321437): n is a or c or g or t.
  misc_feature (527833)..(527833): n is a or c or g or t.
  misc_feature (527901)..(527901): n is a or c or g or t.
  misc_feature (527978)..(527978): n is a or c or g or t.
  misc_feature (960838)..(960839): n is a or c or g or t.
  misc_feature (960860)..(960861): n is a or c or g or t.
  misc_feature (960872)..(960873): n is a or c or g or t.
  misc_feature (960879)..(960879): n is a or c or g or t.
  misc_feature (960890)..(960890): n is a or c or g or t.
  misc_feature (1250239)..(1250239): n is a or c or g or t.
  misc_feature (1302432)..(1302434): n is a or c or g or t.
  misc_feature (1302471)..(1302471): n is a or c or g or t.
  misc_feature (1302488)..(1302488): n is a or c or g or t.
  misc_feature (1674836)..(1674836): n is a or c or g or t.
MSLPAEIEEFNEGIRRAVSGSPIVERKIWVTSLSHCLRKTALSIYLNTYNPSRSWEARIGTALHGWLGEVVRGAEFEIPVEHDLKDGWKLVGKVDAVKGDYLLEFKFRGFENNDSKKNSKKSKKNIDLDHAEPSKESIEQINAYMGILGKEKGYIYIFDRNGLDFRVFEVTFNERLFRRFIKRAEKVIEAVEDLERGEFPKWISTVGNKTWVCNHCPFRPICAAIDRPWEKSR

SEQ ID NO: 1406 - protein, 310 aa, Thermococcus kodakaraensis KOD1
  misc_feature (321437)..(321437): n is a or c or g or t.
  misc_feature (527833)..(527833): n is a or c or g or t.
  misc_feature (527901)..(527901): n is a or c or g or t.
  misc_feature (527978)..(527978): n is a or c or g or t.
  misc_feature (960838)..(960839): n is a or c or g or t.
  misc_feature (960860)..(960861): n is a or c or g or t.
  misc_feature (960872)..(960873): n is a or c or g or t.
  misc_feature (960879)..(960879): n is a or c or g or t.
  misc_feature (960890)..(960890): n is a or c or g or t.
  misc_feature (1250239)..(1250239): n is a or c or g or t.
  misc_feature (1302432)..(1302434): n is a or c or g or t.
  misc_feature (1302471)..(1302471): n is a or c or g or t.
  misc_feature (1302488)..(1302488): n is a or c or g or t.
  misc_feature (1674836)..(1674836): n is a or c or g or t.
MIVSTIASHSSLQILLGAKKEGFKTRLYVSPKRRPFYSSLPIVDDLVVAEEMTSILNDDGIVVPHGSFVAYLGIEAIEKAKARFFGNRRFLKWETTFELQDKALEGAGIPRVEVVEPEDAKPDELYFVRIEGPRGGSGHFIVEGSELEERLSTLEEPYRVERFIPGVYLYVHFFYSPILERLELLGVDERVLIADGNARWPVKPLPYTIVGNRAIALRESLLPQLYDYGLAFVRTMRELEPPGVIGPFALHFAYDGSFKAIGIASRIDGGSNADHWYSELYWGERLSMGRRIARELRLAEEEDRLEEVVT

SEQ ID NO: 1407 - protein, 20 aa, Thermococcus kodakaraensis KOD1
  misc_feature (321437)..(321437): n is a or c or g or t.
  misc_feature (527833)..(527833): n is a or c or g or t.
  misc_feature (527901)..(527901): n is a or c or g or t.
  misc_feature (527978)..(527978): n is a or c or g or t.
  misc_feature (960838)..(960839): n is a or c or g or t.
  misc_feature (960860)..(960861): n is a or c or g or t.
  misc_feature (960872)..(960873): n is a or c or g or t.
  misc_feature (960879)..(960879): n is a or c or g or t.
  misc_feature (960890)..(960890): n is a or c or g or t.
  misc_feature (1250239)..(1250239): n is a or c or g or t.
  misc_feature (1302432)..(1302434): n is a or c or g or t.
  misc_feature (1302471)..(1302471): n is a or c or g or t.
  misc_feature (1302488)..(1302488): n is a or c or g or t.
  misc_feature (1674836)..(1674836): n is a or c or g or t.
VLFDILKNLEGHFKASAIED

SEQ ID NO: 1408 - protein, 194 aa, Thermococcus kodakaraensis KOD1
  misc_feature (321437)..(321437): n is a or c or g or t.
  misc_feature (527833)..(527833): n is a or c or g or t.
  misc_feature (527901)..(527901): n is a or c or g or t.
  misc_feature (527978)..(527978): n is a or c or g or t.
  misc_feature (960838)..(960839): n is a or c or g or t.
  misc_feature (960860)..(960861): n is a or c or g or t.
  misc_feature (960872)..(960873): n is a or c or g or t.
  misc_feature (960879)..(960879): n is a or c or g or t.
  misc_feature (960890)..(960890): n is a or c or g or t.
  misc_feature (1250239)..(1250239): n is a or c or g or t.
  misc_feature (1302432)..(1302434): n is a or c or g or t.
  misc_feature (1302471)..(1302471): n is a or c or g or t.
  misc_feature (1302488)..(1302488): n is a or c or g or t.
  misc_feature (1674836)..(1674836): n is a or c or g or t.
MERYKEGPTVYQLKYFLSKYLFGQPNIIDLDEVYYREFIEELLRSPRVVSMHIKMAATKYAYYMKHEKKMEEDITDLLGDYIYLLEPDLVEIKAVVDGRYKKKRLSKDTVISLLNDLMRINDKLGVVENIIIKYEDPKTHELKEKHIFEDKLISTKKVIRAKEELSRVDTEYMYNKIIEAYNDLYDKIEKSLKG

SEQ ID NO: 1409 - protein, 14 aa, Thermococcus kodakaraensis KOD1
  misc_feature (321437)..(321437): n is a or c or g or t.
  misc_feature (527833)..(527833): n is a or c or g or t.
  misc_feature (527901)..(527901): n is a or c or g or t.
  misc_feature (527978)..(527978): n is a or c or g or t.
  misc_feature (960838)..(960839): n is a or c or g or t.
  misc_feature (960860)..(960861): n is a or c or g or t.
  misc_feature (960872)..(960873): n is a or c or g or t.
  misc_feature (960879)..(960879): n is a or c or g or t.
  misc_feature (960890)..(960890): n is a or c or g or t.
  misc_feature (1250239)..(1250239): n is a or c or g or t.
  misc_feature (1302432)..(1302434): n is a or c or g or t.
  misc_feature (1302471)..(1302471): n is a or c or g or t.
  misc_feature (1302488)..(1302488): n is a or c or g or t.
  misc_feature (1674836)..(1674836): n is a or c or g or t.
MTVFKKKILIKTAL

SEQ ID NO: 1410 - protein, 324 aa, Thermococcus kodakaraensis KOD1
  misc_feature (321437)..(321437): n is a or c or g or t.
  misc_feature (527833)..(527833): n is a or c or g or t.
  misc_feature (527901)..(527901): n is a or c or g or t.
  misc_feature (527978)..(527978): n is a or c or g or t.
  misc_feature (960838)..(960839): n is a or c or g or t.
  misc_feature (960860)..(960861): n is a or c or g or t.
  misc_feature (960872)..(960873): n is a or c or g or t.
  misc_feature (960879)..(960879): n is a or c or g or t.
  misc_feature (960890)..(960890): n is a or c or g or t.
  misc_feature (1250239)..(1250239): n is a or c or g or t.
  misc_feature (1302432)..(1302434): n is a or c or g or t.
  misc_feature (1302471)..(1302471): n is a or c or g or t.
  misc_feature (1302488)..(1302488): n is a or c or g or t.
  misc_feature (1674836)..(1674836): n is a or c or g or t.
VNKNGFLWEAFSRKRLFPSRDDSSDIHKKFNPPGQNAGGGKMKIHYECFACAANQCQRIVEMGTDDLELRKKGVVEAARLMATISEDSIPAIFGSDVFLGVYRVIGNDDPFREYKELSNRLAERVVSDLEKEEIDLRTALKLAIIGNVIDFAVGYSPEKIEEDVREMLGEELYIDHSEELFKVLKSAKTLLYLTDNCGEIYFDRLFLKKLKEAFPRLEIYIAGKEGPIINDATVEDLQNAGFEKLGRVVSTGTRIVGVPFDRVSDEFRAIFEKVDVIIAKGQGNFETLSEINDERVFYLLKAKCRPIARELEVPQGAMVCLRAR

SEQ ID NO: 1411 - protein, 202 aa, Thermococcus kodakaraensis KOD1
  misc_feature (321437)..(321437): n is a or c or g or t.
  misc_feature (527833)..(527833): n is a or c or g or t.
  misc_feature (527901)..(527901): n is a or c or g or t.
  misc_feature (527978)..(527978): n is a or c or g or t.
  misc_feature (960838)..(960839): n is a or c or g or t.
  misc_feature (960860)..(960861): n is a or c or g or t.
  misc_feature (960872)..(960873): n is a or c or g or t.
  misc_feature (960879)..(960879): n is a or c or g or t.
  misc_feature (960890)..(960890): n is a or c or g or t.
  misc_feature (1250239)..(1250239): n is a or c or g or t.
  misc_feature (1302432)..(1302434): n is a or c or g or t.
  misc_feature (1302471)..(1302471): n is a or c or g or t.
  misc_feature (1302488)..(1302488): n is a or c or g or t.
  misc_feature (1674836)..(1674836): n is a or c or g or t.
MKLDEAIMKRASVRYFKDDPVSDEEIRALIEAAIRAPTASGLENWLFVVFKSEEVRKEIYDLIGEGMVEYYRAVNLPEEKIKKLMKRIYEEGMYRAPAYIAVFIDRRVRFLKGREFDEVEFIWSVESAAMAIQNLMLKAVELGLGTVYIGVTNFRGIEEKVRELAGLDENYYLVGLIPVGRPRDEVKPRRRKKGVEEVTRIL

SEQ ID NO: 1412 - protein, 124 aa, Thermococcus kodakaraensis KOD1
  misc_feature (321437)..(321437): n is a or c or g or t.
  misc_feature (527833)..(527833): n is a or c or g or t.
  misc_feature (527901)..(527901): n is a or c or g or t.
  misc_feature (527978)..(527978): n is a or c or g or t.
  misc_feature (960838)..(960839): n is a or c or g or t.
  misc_feature (960860)..(960861): n is a or c or g or t.
  misc_feature (960872)..(960873): n is a or c or g or t.
  misc_feature (960879)..(960879): n is a or c or g or t.
  misc_feature (960890)..(960890): n is a or c or g or t.
  misc_feature (1250239)..(1250239): n is a or c or g or t.
  misc_feature (1302432)..(1302434): n is a or c or g or t.
  misc_feature (1302471)..(1302471): n is a or c or g or t.
  misc_feature (1302488)..(1302488): n is a or c or g or t.
  misc_feature (1674836)..(1674836): n is a or c or g or t.
MNKQTFLSSFSSTSPGERMIEFVIALGLVGGWLTMTSTLFLMLGFGKMWGLAGVLILVGFILINQKLKRKYMQTIVNATPRAKELARHIFEMNELILLSSYVLGLVLYEVIQKYVEIVIKAPVG

SEQ ID NO: 1413 - protein, 191 aa, Thermococcus kodakaraensis KOD1
  misc_feature (321437)..(321437): n is a or c or g or t.
  misc_feature (527833)..(527833): n is a or c or g or t.
  misc_feature (527901)..(527901): n is a or c or g or t.
  misc_feature (527978)..(527978): n is a or c or g or t.
  misc_feature (960838)..(960839): n is a or c or g or t.
  misc_feature (960860)..(960861): n is a or c or g or t.
  misc_feature (960872)..(960873): n is a or c or g or t.
  misc_feature (960879)..(960879): n is a or c or g or t.
  misc_feature (960890)..(960890): n is a or c or g or t.
  misc_feature (1250239)..(1250239): n is a or c or g or t.
  misc_feature (1302432)..(1302434): n is a or c or g or t.
  misc_feature (1302471)..(1302471): n is a or c or g or t.
  misc_feature (1302488)..(1302488): n is a or c or g or t.
  misc_feature (1674836)..(1674836): n is a or c or g or t.
MKAVALLSSGIDSPVAIYLMLRRGVEITPIHFRQDSIKEEKASEIVEILKRYGKLSDPIIVNFSEEHVPAFEKLRELGKIKYTCVLCKWLMLRKACRIGHEIGASAIITGDSLGQVASQTLDNLMVVSTASDLPILRPLIGLDKEEIVRIAKEIGTFEISSRKEPPCPFTPKYPVVRASLGEFQKILQDLI

SEQ ID NO: 1414 - protein, 180 aa, Thermococcus kodakaraensis KOD1
  misc_feature (321437)..(321437): n is a or c or g or t.
  misc_feature (527833)..(527833): n is a or c or g or t.
  misc_feature (527901)..(527901): n is a or c or g or t.
  misc_feature (527978)..(527978): n is a or c or g or t.
  misc_feature (960838)..(960839): n is a or c or g or t.
  misc_feature (960860)..(960861): n is a or c or g or t.
  misc_feature (960872)..(960873): n is a or c or g or t.
  misc_feature (960879)..(960879): n is a or c or g or t.
  misc_feature (960890)..(960890): n is a or c or g or t.
  misc_feature (1250239)..(1250239): n is a or c or g or t.
  misc_feature (1302432)..(1302434): n is a or c or g or t.
  misc_feature (1302471)..(1302471): n is a or c or g or t.
  misc_feature (1302488)..(1302488): n is a or c or g or t.
  misc_feature (1674836)..(1674836): n is a or c or g or t.
VGVEEVARKLDVSKGLVSKTLHLLVKHGIAAKKGRKFHILDTPKTRELKRFLNFIVLSERLKGLKEDWMLGLGVYGSFASGENREDSDIDVWVFARKEELLKSARLKRKISELTDREVDLIVLTPSRLSRLQKEDPIFYYSLVYGSIVIWGERLDRIQSLLRAGSAEKSSAFQRESVAEH

SEQ ID NO: 1415 - protein, 131 aa, Thermococcus kodakaraensis KOD1
  misc_feature (321437)..(321437): n is a or c or g or t.
  misc_feature (527833)..(527833): n is a or c or g or t.
  misc_feature (527901)..(527901): n is a or c or g or t.
  misc_feature (527978)..(527978): n is a or c or g or t.
  misc_feature (960838)..(960839): n is a or c or g or t.
  misc_feature (960860)..(960861): n is a or c or g or t.
  misc_feature (960872)..(960873): n is a or c or g or t.
  misc_feature (960879)..(960879): n is a or c or g or t.
  misc_feature (960890)..(960890): n is a or c or g or t.
  misc_feature (1250239)..(1250239): n is a or c or g or t.
  misc_feature (1302432)..(1302434): n is a or c or g or t.
  misc_feature (1302471)..(1302471): n is a or c or g or t.
  misc_feature (1302488)..(1302488): n is a or c or g or t.
  misc_feature (1674836)..(1674836): n is a or c or g or t.
MKLIIKPEKGLGKIEVELSEEVWREIEQLSERYGVPPEKIIEITLTSEFRKPRGDLEELEGKVKELEEKVWELEKEYAPLRFKAYGLSEDNKILAIELTGLMAENNQLRRFLKLPLRRDLELRKLISYYMR

SEQ ID NO: 1416 - protein, 228 aa, Thermococcus kodakaraensis KOD1
  misc_feature (321437)..(321437): n is a or c or g or t.
  misc_feature (527833)..(527833): n is a or c or g or t.
  misc_feature (527901)..(527901): n is a or c or g or t.
  misc_feature (527978)..(527978): n is a or c or g or t.
  misc_feature (960838)..(960839): n is a or c or g or t.
  misc_feature (960860)..(960861): n is a or c or g or t.
  misc_feature (960872)..(960873): n is a or c or g or t.
  misc_feature (960879)..(960879): n is a or c or g or t.
  misc_feature (960890)..(960890): n is a or c or g or t.
  misc_feature (1250239)..(1250239): n is a or c or g or t.
  misc_feature (1302432)..(1302434): n is a or c or g or t.
  misc_feature (1302471)..(1302471): n is a or c or g or t.
  misc_feature (1302488)..(1302488): n is a or c or g or t.
  misc_feature (1674836)..(1674836): n is a or c or g or t.
VNIKPLGDSALLISFGEVIDDEVNARVHAVARAIEGKDFGWLVEVVPAYSSLAVIFDPLKVTFEDVKKAVEPLLDVSTGAFKGRKIEIPVLYGGEYGPDIEFVAEYNGLGVDDVIEIHSGKTYRVHFLGFLPGFAYLSPVDERIATPRLERPRLKVPAGSVGIAGRQTGIYPIESPGGWRLIGRTPLRLFDPSREPPTLLQPGDEVRFVPISEEEFVELYRGEWRSKQ

SEQ ID NO: 1417 - protein, 242 aa, Thermococcus kodakaraensis KOD1
  misc_feature (321437)..(321437): n is a or c or g or t.
  misc_feature (527833)..(527833): n is a or c or g or t.
  misc_feature (527901)..(527901): n is a or c or g or t.
  misc_feature (527978)..(527978): n is a or c or g or t.
  misc_feature (960838)..(960839): n is a or c or g or t.
  misc_feature (960860)..(960861): n is a or c or g or t.
  misc_feature (960872)..(960873): n is a or c or g or t.
  misc_feature (960879)..(960879): n is a or c or g or t.
  misc_feature (960890)..(960890): n is a or c or g or t.
  misc_feature (1250239)..(1250239): n is a or c or g or t.
  misc_feature (1302432)..(1302434): n is a or c or g or t.
  misc_feature (1302471)..(1302471): n is a or c or g or t.
  misc_feature (1302488)..(1302488): n is a or c or g or t.
  misc_feature (1674836)..(1674836): n is a or c or g or t.
MSVETCAVHINALLLEGQYPIVAELDGRIVGEAEVFLSEEQINGEMMRIAHLDVIEVHPDFRGKGIGRAIIEYIEGSFAGKAELLTTQPDEEAIGFYRKLGFHEVLYENWLVEVPTAKSSGDNVRPLKFFPWEKVKGLELVAGRFQSSYDMWFSSFKDIFAGVHELAEAGKVGNSYYVLKPLPGRPRKASLFLWGDEKDIPGAIGRAGEIGFKSVLTVLDEKTANALSTEKKGKVPIIAKRL

SEQ ID NO: 1418 - protein, 220 aa, Thermococcus kodakaraensis KOD1
  misc_feature (321437)..(321437): n is a or c or g or t.
  misc_feature (527833)..(527833): n is a or c or g or t.
  misc_feature (527901)..(527901): n is a or c or g or t.
  misc_feature (527978)..(527978): n is a or c or g or t.
  misc_feature (960838)..(960839): n is a or c or g or t.
  misc_feature (960860)..(960861): n is a or c or g or t.
  misc_feature (960872)..(960873): n is a or c or g or t.
  misc_feature (960879)..(960879): n is a or c or g or t.
  misc_feature (960890)..(960890): n is a or c or g or t.
  misc_feature (1250239)..(1250239): n is a or c or g or t.
  misc_feature (1302432)..(1302434): n is a or c or g or t.
  misc_feature (1302471)..(1302471): n is a or c or g or t.
  misc_feature (1302488)..(1302488): n is a or c or g or t.
  misc_feature (1674836)..(1674836): n is a or c or g or t.
MNMLEFPHDTHTHTVYSDGIGSIADNIASAEEKGLKLLGITDHSHYVVGKTFNRYIREIRRWGNESEITVLTGIEGNITPNGVDVPDFVAEKLDYVIASVHEWVDTPNEYLDLVKLALMDENVDVIGHFGANFPYVGFPSVEELNEVLELAEAKGKAFEISSRYRVPELDFIRECIKRGIKLTFASDAHFPEGVGNVGWSEKVFKKAGGKKEDLLFEEFL

SEQ ID NO: 1419 - protein, 325 aa, Thermococcus kodakaraensis KOD1
  misc_feature (321437)..(321437): n is a or c or g or t.
  misc_feature (527833)..(527833): n is a or c or g or t.
  misc_feature (527901)..(527901): n is a or c or g or t.
  misc_feature (527978)..(527978): n is a or c or g or t.
  misc_feature (960838)..(960839): n is a or c or g or t.
  misc_feature (960860)..(960861): n is a or c or g or t.
  misc_feature (960872)..(960873): n is a or c or g or t.
  misc_feature (960879)..(960879): n is a or c or g or t.
  misc_feature (960890)..(960890): n is a or c or g or t.
  misc_feature (1250239)..(1250239): n is a or c or g or t.
  misc_feature (1302432)..(1302434): n is a or c or g or t.
  misc_feature (1302471)..(1302471): n is a or c or g or t.
  misc_feature (1302488)..(1302488): n is a or c or g or t.
  misc_feature (1674836)..(1674836): n is a or c or g or t.
MTSHPNPQVIMNEIIERLKRLSPKELLSYAIFNEEDEAKYYAELAEKAKRKSVRALFKKMSRESKGHELLLRRTFERLFPGEEPVKVDVPPVEVYPFYPEFEKVEDYIRALEYCMESELFAKRTYEILAGVAENEDVRGIAFELSQIEQKHYEEIKKVYDIVISFERRHVFIERLGSGAYLVTDDEKAKYILLDMLTENREVIAVIREHPDKFRELTEIDNVIWVSKISEEYPGKVVPPKFVPELKGELLKFLKSAKENGKQGVVFVQNVGYLVVELGFKDAMDFLLYVKDAAMVYNGYIIVSANPDAFEKKEWGLLTSEFEVIL

SEQ ID NO: 1420 - protein, 455 aa, Thermococcus kodakaraensis KOD1
  misc_feature (321437)..(321437): n is a or c or g or t.
  misc_feature (527833)..(527833): n is a or c or g or t.
  misc_feature (527901)..(527901): n is a or c or g or t.
  misc_feature (527978)..(527978): n is a or c or g or t.
  misc_feature (960838)..(960839): n is a or c or g or t.
  misc_feature (960860)..(960861): n is a or c or g or t.
  misc_feature (960872)..(960873): n is a or c or g or t.
  misc_feature (960879)..(960879): n is a or c or g or t.
  misc_feature (960890)..(960890): n is a or c or g or t.
  misc_feature (1250239)..(1250239): n is a or c or g or t.
  misc_feature (1302432)..(1302434): n is a or c or g or t.
  misc_feature (1302471)..(1302471): n is a or c or g or t.
  misc_feature (1302488)..(1302488): n is a or c or g or t.
  misc_feature (1674836)..(1674836): n is a or c or g or t.
MGRREEMIAKIKELMTQPERIRNMGIAAHIDHGKTTLSDNLLAGAGMISEELAGKQLVLDFDEQEQARGITINAANVSMVHNYEGNDYLINLIDTPGHVDFGGDVTRAMRAIDGAIIVVDAVEGVMPQTETVLRQALREYVKPVLFINKVDRLIKELKLTPQQMQERFVKVITDVNRLIRRYAPPEFKDKWLVKVEDGSVAFGSAYYNWALSVPYMKKTGVSFKDIIDLTNAGDLKTLRKKAPLHVVVLDMVVKHLPNPLEAQKYRIPHLWRGDINSDVGQAMMNCDPKGPMTMVVTKIILDKHAGEVATGRVWSGTVKTGQEVYLINSKRKARIQQVGIYMGPERINMEPFPLETSSPLLASAMLWPVRPFQSSRSSRLRPSTTPASRLLPLLSRPRTLRTFRSSLRPSGSSPRRTRRSTSRSTRRPASTSSAVWVSSTLRSSSTGSRPNGSSM

SEQ ID NO: 1421 - protein, 225 aa, Thermococcus kodakaraensis KOD1
  misc_feature (321437)..(321437): n is a or c or g or t.
  misc_feature (527833)..(527833): n is a or c or g or t.
  misc_feature (527901)..(527901): n is a or c or g or t.
  misc_feature (527978)..(527978): n is a or c or g or t.
  misc_feature (960838)..(960839): n is a or c or g or t.
  misc_feature (960860)..(960861): n is a or c or g or t.
  misc_feature (960872)..(960873): n is a or c or g or t.
  misc_feature (960879)..(960879): n is a or c or g or t.
  misc_feature (960890)..(960890): n is a or c or g or t.
  misc_feature (1250239)..(1250239): n is a or c or g or t.
  misc_feature (1302432)..(1302434): n is a or c or g or t.
  misc_feature (1302471)..(1302471): n is a or c or g or t.
  misc_feature (1302488)..(1302488): n is a or c or g or t.
  misc_feature (1674836)..(1674836): n is a or c or g or t.
MRIVFDIGGSVLVPEDPDIDFIKAIAYELVKISEDHEVAVVVGGGKVARKYIQAAKEFTLNETFKDYIGIHITRANAMLLIAALGEKAYPFVVQDFRKAWEVIQLKKIPIMGGTHPGHTTDAVAALLAEYLQADLLVVVTNVDGVYDSDPKKNPNAKKLDRITVDQLVEIAMQEESKAGGSGVVDALAAKFIQRGKIKTYIVGKKDAYHLFDVIKGKHSGTVVEP

SEQ ID NO: 1422 - protein, 169 aa, Thermococcus kodakaraensis KOD1
  misc_feature (321437)..(321437): n is a or c or g or t.
  misc_feature (527833)..(527833): n is a or c or g or t.
  misc_feature (527901)..(527901): n is a or c or g or t.
  misc_feature (527978)..(527978): n is a or c or g or t.
  misc_feature (960838)..(960839): n is a or c or g or t.
  misc_feature (960860)..(960861): n is a or c or g or t.
  misc_feature (960872)..(960873): n is a or c or g or t.
  misc_feature (960879)..(960879): n is a or c or g or t.
  misc_feature (960890)..(960890): n is a or c or g or t.
  misc_feature (1250239)..(1250239): n is a or c or g or t.
  misc_feature (1302432)..(1302434): n is a or c or g or t.
  misc_feature (1302471)..(1302471): n is a or c or g or t.
  misc_feature (1302488)..(1302488): n is a or c or g or t.
  misc_feature (1674836)..(1674836): n is a or c or g or t.
MAYILRHSPEEFGLRPDVEGFVSLNELVNALKTVYPEVTEEFVREIVENDPKGRYEIRGDRIRARYGHSFPVSLDHEEDTESRFLYHGTPRRNLPSILKEGLKPMKRQYVHVSTDKIEALETGRRHGREVVLLVIDAECLRKRGFKIYKAGKNVRIVERVPPDCITLAV

SEQ ID NO: 1423 - protein, 469 aa, Thermococcus kodakaraensis KOD1
  misc_feature (321437)..(321437): n is a or c or g or t.
  misc_feature (527833)..(527833): n is a or c or g or t.
  misc_feature (527901)..(527901): n is a or c or g or t.
  misc_feature (527978)..(527978): n is a or c or g or t.
  misc_feature (960838)..(960839): n is a or c or g or t.
  misc_feature (960860)..(960861): n is a or c or g or t.
  misc_feature (960872)..(960873): n is a or c or g or t.
  misc_feature (960879)..(960879): n is a or c or g or t.
  misc_feature (960890)..(960890): n is a or c or g or t.
  misc_feature (1250239)..(1250239): n is a or c or g or t.
  misc_feature (1302432)..(1302434): n is a or c or g or t.
  misc_feature (1302471)..(1302471): n is a or c or g or t.
  misc_feature (1302488)..(1302488): n is a or c or g or t.
  misc_feature (1674836)..(1674836): n is a or c or g or t.
VGSMTSVGIIGGGIAGLTAALSLAKLGYEVTLIHTGINTTNSYLAQAGIAFPLLEGDSITAHVIDTMRGGKYINDKETVWNVISKASEAYDFLLSLGVKFETNETEGGHSFPRVFTIKNETGKHLTKILYLHAKEGGVNFIKGEAEELAVKHGKAYGVFVNGEFLKFDATIIASGGFTGLFKYTAGSPTNLGTLIGDAVMKGAFARDLEFIQFHPTGFIGEDGVKLISEAVRGAGARLVTEDGKRFVNELSTRDIVARAIYLKMQEGERVFLDATGIADFKKKFPQIYAFLRKEGIDPSRDLIPIAPIAHYTIGGIAVDTWYRTGIKNLYAIGEAASNGFHGANRLASNSLLECIVSGLEVARTIVRDKPKGREVKEPPYHGYETGDIESLREILWGHAGIVRNERTLKEGLKKLRDVEADPRLKLLVRGVLECALAREESRGAHYREDFPAMRKEFERPSFFDGKCRL

SEQ ID NO: 1424 - protein, 249 aa, Thermococcus kodakaraensis KOD1
  misc_feature (321437)..(321437): n is a or c or g or t.
  misc_feature (527833)..(527833): n is a or c or g or t.
  misc_feature (527901)..(527901): n is a or c or g or t.
  misc_feature (527978)..(527978): n is a or c or g or t.
  misc_feature (960838)..(960839): n is a or c or g or t.
  misc_feature (960860)..(960861): n is a or c or g or t.
  misc_feature (960872)..(960873): n is a or c or g or t.
  misc_feature (960879)..(960879): n is a or c or g or t.
  misc_feature (960890)..(960890): n is a or c or g or t.
  misc_feature (1250239)..(1250239): n is a or c or g or t.
  misc_feature (1302432)..(1302434): n is a or c or g or t.
  misc_feature (1302471)..(1302471): n is a or c or g or t.
  misc_feature (1302488)..(1302488): n is a or c or g or t.
  misc_feature (1674836)..(1674836): n is a or c or g or t.
MLVYFIGTGGSEGIPAHLCTCSSCNEARKFGFAQRRPSTLAVVTENRKTVLFDVGTDIRDFLNVPLEAIFLTHWHHDHIYGLYKLRWMAMETELYAPEGQADALILNEPKNLKPKTLKPMDRIKIDTLKITALKLNHQVETLGYLIEEDGKSFALLYDTKGLPEETWQVLRKKAPLRGVVVDATYPPGFNDPYHNNVDEAAEIGLQLAERTVLSHISHKNLPFLELVEYVRKRWGNKVLVAYDGMVFYV

SEQ ID NO: 1425 - protein, 163 aa, Thermococcus kodakaraensis KOD1
  misc_feature (321437)..(321437): n is a or c or g or t.
  misc_feature (527833)..(527833): n is a or c or g or t.
  misc_feature (527901)..(527901): n is a or c or g or t.
  misc_feature (527978)..(527978): n is a or c or g or t.
  misc_feature (960838)..(960839): n is a or c or g or t.
  misc_feature (960860)..(960861): n is a or c or g or t.
  misc_feature (960872)..(960873): n is a or c or g or t.
  misc_feature (960879)..(960879): n is a or c or g or t.
  misc_feature (960890)..(960890): n is a or c or g or t.
  misc_feature (1250239)..(1250239): n is a or c or g or t.
  misc_feature (1302432)..(1302434): n is a or c or g or t.
  misc_feature (1302471)..(1302471): n is a or c or g or t.
  misc_feature (1302488)..(1302488): n is a or c or g or t.
  misc_feature (1674836)..(1674836): n is a or c or g or t.
MITRGRVWRFGDNVSTDTITPGRYNLTKDPEELARIAFIEARPEFSREVKPGDVVVGGRNFGIGSSRESAALSLKAAGVAGVIAESFGRIFYRNAVNLGLPLLVGDTSGLRDGEVVEVNWRTGEVRTENGVFHFKPLDGFLLRIVEEGGILSFIARRGDLCIE

SEQ ID NO: 1426 - protein, 53 aa, Thermococcus kodakaraensis KOD1
  misc_feature (321437)..(321437): n is a or c or g or t.
  misc_feature (527833)..(527833): n is a or c or g or t.
  misc_feature (527901)..(527901): n is a or c or g or t.
  misc_feature (527978)..(527978): n is a or c or g or t.
  misc_feature (960838)..(960839): n is a or c or g or t.
  misc_feature (960860)..(960861): n is a or c or g or t.
  misc_feature (960872)..(960873): n is a or c or g or t.
  misc_feature (960879)..(960879): n is a or c or g or t.
  misc_feature (960890)..(960890): n is a or c or g or t.
  misc_feature (1250239)..(1250239): n is a or c or g or t.
  misc_feature (1302432)..(1302434): n is a or c or g or t.
  misc_feature (1302471)..(1302471): n is a or c or g or t.
  misc_feature (1302488)..(1302488): n is a or c or g or t.
  misc_feature (1674836)..(1674836): n is a or c or g or t.
MVECPVCGSEIEIGEVELHQIVECPVCGAELEVVSLEPLTLEELPEVEEDWGE

SEQ ID NO: 1427 - protein, 362 aa, Thermococcus kodakaraensis KOD1
  misc_feature (321437)..(321437): n is a or c or g or t.
  misc_feature (527833)..(527833): n is a or c or g or t.
  misc_feature (527901)..(527901): n is a or c or g or t.
  misc_feature (527978)..(527978): n is a or c or g or t.
  misc_feature (960838)..(960839): n is a or c or g or t.
  misc_feature (960860)..(960861): n is a or c or g or t.
  misc_feature (960872)..(960873): n is a or c or g or t.
  misc_feature (960879)..(960879): n is a or c or g or t.
  misc_feature (960890)..(960890): n is a or c or g or t.
  misc_feature (1250239)..(1250239): n is a or c or g or t.
  misc_feature (1302432)..(1302434): n is a or c or g or t.
  misc_feature (1302471)..(1302471): n is a or c or g or t.
  misc_feature (1302488)..(1302488): n is a or c or g or t.
  misc_feature (1674836)..(1674836): n is a or c or g or t.
MPLYRKRLRLVRGEGVYVWDEKGRRYLDLIAGIGVNVLGHAHPEWVLDMSRQLEKIVVAGPMFEHDEREEMLEELSHWVDYEYVYMGNSGTEAVEAAIKFARLATGRSEIVAMTNAFHGRTLGSLSATWKKKYREGFGPLVPGFKHIPFNNVEAAKEAITKETAAVIFEPIQGEGGIVPADEEFVKTLRDLTEDVGALLIADEVQSGLRTGKFLAIEHYGVRPDIVTMGKGIGNGFPVSLTLTDLEIPRGKHGSTFGGNPLACRAVATTLRILRRDRLVEKAGEKFMEFSGERVVKTRGRGLMIGIVLRRPAGNYVKALQERGILVNTAGNRVIRLLPPLIIEGDTLEEARKEIEGVLNDIL

SEQ ID NO: 1428 - protein, 304 aa, Thermococcus kodakaraensis KOD1
  misc_feature (321437)..(321437): n is a or c or g or t.
  misc_feature (527833)..(527833): n is a or c or g or t.
  misc_feature (527901)..(527901): n is a or c or g or t.
  misc_feature (527978)..(527978): n is a or c or g or t.
  misc_feature (960838)..(960839): n is a or c or g or t.
  misc_feature (960860)..(960861): n is a or c or g or t.
  misc_feature (960872)..(960873): n is a or c or g or t.
  misc_feature (960879)..(960879): n is a or c or g or t.
  misc_feature (960890)..(960890): n is a or c or g or t.
  misc_feature (1250239)..(1250239): n is a or c or g or t.
  misc_feature (1302432)..(1302434): n is a or c or g or t.
  misc_feature (1302471)..(1302471): n is a or c or g or t.
  misc_feature (1302488)..(1302488): n is a or c or g or t.
  misc_feature (1674836)..(1674836): n is a or c or g or t.
MRFKFEKGSKPKTVVKVGGVKIGDGFTVIAGPCAVESQEQIMKVAEFLAEMGVKVLRGGAFKPRTSPYSFQGHGEEALKWMRRAADEYGLVTVTEVMDVSQVELVAKYSDMLQIGARNSQNFELLKAVGKVDNPVVLKRGMANTVQELLYSAEYILSGGNENVILCERGIRTFETSTRFTLDISAVPVVKELSHLPIIVDPSHPAGRRELVIPLAKAAYAVGADGIMVEVHPEPDKALSDSAQQLTFEDFERLLGELEGLGWKGTTSREAAEGVPRYVLSERVEENDWYTEVFLMELGGLGWRA

SEQ ID NO: 1429 - protein, 213 aa, Thermococcus kodakaraensis KOD1
  misc_feature (321437)..(321437): n is a or c or g or t.
  misc_feature (527833)..(527833): n is a or c or g or t.
  misc_feature (527901)..(527901): n is a or c or g or t.
  misc_feature (527978)..(527978): n is a or c or g or t.
  misc_feature (960838)..(960839): n is a or c or g or t.
  misc_feature (960860)..(960861): n is a or c or g or t.
  misc_feature (960872)..(960873): n is a or c or g or t.
  misc_feature (960879)..(960879): n is a or c or g or t.
  misc_feature (960890)..(960890): n is a or c or g or t.
  misc_feature (1250239)..(1250239): n is a or c or g or t.
  misc_feature (1302432)..(1302434): n is a or c or g or t.
  misc_feature (1302471)..(1302471): n is a or c or g or t.
  misc_feature (1302488)..(1302488): n is a or c or g or t.
  misc_feature (1674836)..(1674836): n is a or c or g or t.
MIAGVVTARNPGEALEKIKTSKFNLYEVRLDSFESFEGLEVLGEYSKKLIFTPRRREEGGIRPLDDGTRLSLYRRVMELKPAYVDVEFASDIAQEVMELAKEKGVGVILSYHDFNGTPDFGKLLTLLEDMEELEPEIIKIVTTANSPLDNLRVLRLYEHAENLIAFCMGPLGRISRVFSAQLAPFTYAPLEGEVAPGQLRAEELDRLRVMLFG

SEQ ID NO: 1430 - protein, 126 aa, Thermococcus kodakaraensis KOD1
  misc_feature (321437)..(321437): n is a or c or g or t.
  misc_feature (527833)..(527833): n is a or c or g or t.
  misc_feature (527901)..(527901): n is a or c or g or t.
  misc_feature (527978)..(527978): n is a or c or g or t.
  misc_feature (960838)..(960839): n is a or c or g or t.
  misc_feature (960860)..(960861): n is a or c or g or t.
  misc_feature (960872)..(960873): n is a or c or g or t.
  misc_feature (960879)..(960879): n is a or c or g or t.
  misc_feature (960890)..(960890): n is a or c or g or t.
  misc_feature (1250239)..(1250239): n is a or c or g or t.
  misc_feature (1302432)..(1302434): n is a or c or g or t.
  misc_feature (1302471)..(1302471): n is a or c or g or t.
  misc_feature (1302488)..(1302488): n is a or c or g or t.
  misc_feature (1674836)..(1674836): n is a or c or g or t.
VVVLNRTPEKAKALERFGITGDALNRENLGEYLEWAEVLINATSVGMNSWETPVPAELLRRDLVVMDIVYKPLKTRLLTEAELRGCKTVDGLWMLVYQGIESFRLWTGFKPDEGLMRGAALEGISE

SEQ ID NO: 1431 - protein, 415 aa, Thermococcus kodakaraensis KOD1
  misc_feature (321437)..(321437): n is a or c or g or t.
  misc_feature (527833)..(527833): n is a or c or g or t.
  misc_feature (527901)..(527901): n is a or c or g or t.
  misc_feature (527978)..(527978): n is a or c or g or t.
  misc_feature (960838)..(960839): n is a or c or g or t.
  misc_feature (960860)..(960861): n is a or c or g or t.
  misc_feature (960872)..(960873): n is a or c or g or t.
  misc_feature (960879)..(960879): n is a or c or g or t.
  misc_feature (960890)..(960890): n is a or c or g or t.
  misc_feature (1250239)..(1250239): n is a or c or g or t.
  misc_feature (1302432)..(1302434): n is a or c or g or t.
  misc_feature (1302471)..(1302471): n is a or c or g or t.
  misc_feature (1302488)..(1302488): n is a or c or g or t.
  misc_feature (1674836)..(1674836): n is a or c or g or t.
VGAVWESPDNRAEVIALIIRPVDEVRGELNAPPSKSYTHRAYFLALLAEGESTIENPLVCDDTLATIEAIRSFGAGVDGKTVVPPEEPSPGFVYARESGTTARFSTALAGGIGGKTLIDGARRLRERPMDGLVKALKGLGAEVDGFSLPLTVKGPVKSGRVSVDASKSSQFVSGLLLLGAEVGLKVEARNPVSKPYIEMTLRTMEAFGVEFEREGFSFEVYPGVKGTRYKVPGDYSTASFFLAAGALYGKVRVNNLLREDVQADMAFLDALEEFGARVKRGRDYVKVEGGELKAVALDCSDFPDSFPILAVVAAYAEGRSVIRARQLRFKESDRVRAMAVNLSRMGVKVRELEDGLEIEGGRPRGAKVETFNDHRIAMAMSIAALGATGPSIIEDTESVSKSHPGFFDDLRRLLE

SEQ ID NO: 1432 - protein, 364 aa, Thermococcus kodakaraensis KOD1
  misc_feature (321437)..(321437): n is a or c or g or t.
  misc_feature (527833)..(527833): n is a or c or g or t.
  misc_feature (527901)..(527901): n is a or c or g or t.
  misc_feature (527978)..(527978): n is a or c or g or t.
  misc_feature (960838)..(960839): n is a or c or g or t.
  misc_feature (960860)..(960861): n is a or c or g or t.
  misc_feature (960872)..(960873): n is a or c or g or t.
  misc_feature (960879)..(960879): n is a or c or g or t.
  misc_feature (960890)..(960890): n is a or c or g or t.
  misc_feature (1250239)..(1250239): n is a or c or g or t.
  misc_feature (1302432)..(1302434): n is a or c or g or t.
  misc_feature (1302471)..(1302471): n is a or c or g or t.
  misc_feature (1302488)..(1302488): n is a or c or g or t.
  misc_feature (1674836)..(1674836): n is a or c or g or t.
MFNVYEFFNRINEVRPESRLDAGQPDIPVRREIIEEAVESLRRGETGYTSTGGIRELRERIAEFEGVSADEVIVAPGAKILIAAEIASAKKVAVVSPRWNAYSLIARQFWREVEVIKTTLDERWIPRVEEIKADLIIINYPNNPTGRVLSGKEIRGLLDVAEENGVKVLSDEVYAELSFTRFTPARELYENVVTVKGFSKLYSMTGFRLGYAIGERNEIRRIQRFIESTVTCVPPFVQRAGVKALELRDELIKEVRRAYLERVRMASKMLRGFDFVEPEGAFYIFLRTPQDGMAFAERLLSRGVAVFPGMAFGDYPNFIRISLSGKGLERGLRVIREELECALESRATEGWEGSSRGVSAEGSR

SEQ ID NO: 1433 - protein, 197 aa, Thermococcus kodakaraensis KOD1
  misc_feature (321437)..(321437): n is a or c or g or t.
  misc_feature (527833)..(527833): n is a or c or g or t.
  misc_feature (527901)..(527901): n is a or c or g or t.
  misc_feature (527978)..(527978): n is a or c or g or t.
  misc_feature (960838)..(960839): n is a or c or g or t.
  misc_feature (960860)..(960861): n is a or c or g or t.
  misc_feature (960872)..(960873): n is a or c or g or t.
  misc_feature (960879)..(960879): n is a or c or g or t.
  misc_feature (960890)..(960890): n is a or c or g or t.
  misc_feature (1250239)..(1250239): n is a or c or g or t.
  misc_feature (1302432)..(1302434): n is a or c or g or t.
  misc_feature (1302471)..(1302471): n is a or c or g or t.
  misc_feature (1302488)..(1302488): n is a or c or g or t.
  misc_feature (1674836)..(1674836): n is a or c or g or t.
VGMAMRPIILKGEKVALGVIIKEDVQKIWEWNNDREVAKSLADPSDVSTLEEWMRWYENLTAKKLTKRAFAVLNDDGELVGTVILSGIDLRNGTAEIGYFIGKEHWGKGYASEAVKLALRFCFQYMNLRKVFARTYENNAASIKVLEKNGFKLTGKLRKHAWTPEGYVDVLFYDIMREEWQALAEAMGNTWTSCFTS

SEQ ID NO: 1434 - protein, 273 aa, Thermococcus kodakaraensis KOD1
  misc_feature (321437)..(321437): n is a or c or g or t.
  misc_feature (527833)..(527833): n is a or c or g or t.
  misc_feature (527901)..(527901): n is a or c or g or t.
  misc_feature (527978)..(527978): n is a or c or g or t.
  misc_feature (960838)..(960839): n is a or c or g or t.
  misc_feature (960860)..(960861): n is a or c or g or t.
  misc_feature (960872)..(960873): n is a or c or g or t.
  misc_feature (960879)..(960879): n is a or c or g or t.
  misc_feature (960890)..(960890): n is a or c or g or t.
  misc_feature (1250239)..(1250239): n is a or c or g or t.
  misc_feature (1302432)..(1302434): n is a or c or g or t.
  misc_feature (1302471)..(1302471): n is a or c or g or t.
  misc_feature (1302488)..(1302488): n is a or c or g or t.
  misc_feature (1674836)..(1674836): n is a or c or g or t.
MEPIIREAKPEDKPFIEEIARLTWGGEDYLARVFDEWVRDGNFYVLELEGKVIGTAKLTLLPKRVGWMEGLRVHPDYRGRGFGRMLHNFIVSKGKELAEEGKIDALEFATYFLNRESIAMAKKNGFKIVKRYYIMGKAVEEIKPSKPSDSTIASLEELEYEKYIPVGWKFVHKVPEALEWLKEKAIIKECNGAKFMMPKDSESAFVPFRLSKSYVEQLLPCMAQEALNANQKYIEIMVPEERKELLEPLKELGFEVWDNPKEPNVLVFRRRFE

SEQ ID NO: 1435 - protein, 34 aa, Thermococcus kodakaraensis KOD1
  misc_feature (321437)..(321437): n is a or c or g or t.
  misc_feature (527833)..(527833): n is a or c or g or t.
  misc_feature (527901)..(527901): n is a or c or g or t.
  misc_feature (527978)..(527978): n is a or c or g or t.
  misc_feature (960838)..(960839): n is a or c or g or t.
  misc_feature (960860)..(960861): n is a or c or g or t.
  misc_feature (960872)..(960873): n is a or c or g or t.
  misc_feature (960879)..(960879): n is a or c or g or t.
  misc_feature (960890)..(960890): n is a or c or g or t.
  misc_feature (1250239)..(1250239): n is a or c or g or t.
  misc_feature (1302432)..(1302434): n is a or c or g or t.
  misc_feature (1302471)..(1302471): n is a or c or g or t.
  misc_feature (1302488)..(1302488): n is a or c or g or t.
  misc_feature (1674836)..(1674836): n is a or c or g or t.
MFVDIVKASREDKSHENIIIPTTKAKFENVKTPK

SEQ ID NO: 1436 - protein, 68 aa, Thermococcus kodakaraensis KOD1
  misc_feature (321437)..(321437): n is a or c or g or t.
  misc_feature (527833)..(527833): n is a or c or g or t.
  misc_feature (527901)..(527901): n is a or c or g or t.
  misc_feature (527978)..(527978): n is a or c or g or t.
  misc_feature (960838)..(960839): n is a or c or g or t.
  misc_feature (960860)..(960861): n is a or c or g or t.
  misc_feature (960872)..(960873): n is a or c or g or t.
  misc_feature (960879)..(960879): n is a or c or g or t.
  misc_feature (960890)..(960890): n is a or c or g or t.
  misc_feature (1250239)..(1250239): n is a or c or g or t.
  misc_feature (1302432)..(1302434): n is a or c or g or t.
  misc_feature (1302471)..(1302471): n is a or c or g or t.
  misc_feature (1302488)..(1302488): n is a or c or g or t.
  misc_feature (1674836)..(1674836): n is a or c or g or t.
MQACIEIAKGLPEWFIERDLRKEETYLTAENGNVLGSITVKPTNEKALEILWMAVKREHRRKILAPPS

SEQ ID NO: 1437 - protein, 389 aa, Thermococcus kodakaraensis KOD1
  misc_feature (321437)..(321437): n is a or c or g or t.
  misc_feature (527833)..(527833): n is a or c or g or t.
  misc_feature (527901)..(527901): n is a or c or g or t.
  misc_feature (527978)..(527978): n is a or c or g or t.
  misc_feature (960838)..(960839): n is a or c or g or t.
  misc_feature (960860)..(960861): n is a or c or g or t.
  misc_feature (960872)..(960873): n is a or c or g or t.
  misc_feature (960879)..(960879): n is a or c or g or t.
  misc_feature (960890)..(960890): n is a or c or g or t.
  misc_feature (1250239)..(1250239): n is a or c or g or t.
  misc_feature (1302432)..(1302434): n is a or c or g or t.
  misc_feature (1302471)..(1302471): n is a or c or g or t.
  misc_feature (1302488)..(1302488): n is a or c or g or t.
  misc_feature (1674836)..(1674836): n is a or c or g or t.
MRWSEIPREAKAYMIYHTLIAPGLITWTLFPLYLMMTGYSILEVGVFFTIVNIASIPLTYLFGRLFNRWDIKKGLIVIDILDGIAYVMYGLAKGAIAPLMLFGGKVIDKLSTLLYPLYQAYEQIIYPEDKYEEIFAWHLRLPEIATLVSFPIMGYLLGYVYNRPEHYRLTFLFFGLFSVVTVAYLWLFLPPVGKEERITPEGFTFKAGEFKRLLAFETLLTLAWGLAPEFVLINYVVFVLHKTVFEITLIAVASSLLRIAGTYASERVPKNKGFHAIALGMFLNALYAFVMALAPPFWLALVVYAIGDFGNALWFPFYRSWLFKLIPKERTTEFHAALSSYRKVLGLITPITAGFLASIHPTLPYGASLAGFIVAGLFLLWIAKKRGRP

SEQ ID NO: 1438 - protein, 280 aa, Thermococcus kodakaraensis KOD1
  misc_feature (321437)..(321437): n is a or c or g or t.
  misc_feature (527833)..(527833): n is a or c or g or t.
  misc_feature (527901)..(527901): n is a or c or g or t.
  misc_feature (527978)..(527978): n is a or c or g or t.
  misc_feature (960838)..(960839): n is a or c or g or t.
  misc_feature (960860)..(960861): n is a or c or g or t.
  misc_feature (960872)..(960873): n is a or c or g or t.
  misc_feature (960879)..(960879): n is a or c or g or t.
  misc_feature (960890)..(960890): n is a or c or g or t.
  misc_feature (1250239)..(1250239): n is a or c or g or t.
  misc_feature (1302432)..(1302434): n is a or c or g or t.
  misc_feature (1302471)..(1302471): n is a or c or g or t.
  misc_feature (1302488)..(1302488): n is a or c or g or t.
  misc_feature (1674836)..(1674836): n is a or c or g or t.
VRVMVPLEYLLRFIEEDAPFGDVTSEAVIPEDMKARAVIIAKQNGVIAGVEEAKALFEHFGVKVEVKKRDGELVGKRDVILELEGNARAILLVERTALNVMGRMSGIATEVRKLVEKVKSVNPKVRVAGTRKTLLKPIDKRALLIGGGETHRFSLSDAILIKDNHLALVPLEEAIKRAKEFSVYKVVEVEVESLEDALKAARAGADVVMLDNMKPAEIAEVIEALKREGLREKVKIEVSGGITPENITEYAKLDVDVISLGYLTHSVKNFDVSLEIIGRL

SEQ ID NO: 1439 - protein, 197 aa, Thermococcus kodakaraensis KOD1
  misc_feature (321437)..(321437): n is a or c or g or t.
  misc_feature (527833)..(527833): n is a or c or g or t.
  misc_feature (527901)..(527901): n is a or c or g or t.
  misc_feature (527978)..(527978): n is a or c or g or t.
  misc_feature (960838)..(960839): n is a or c or g or t.
  misc_feature (960860)..(960861): n is a or c or g or t.
  misc_feature (960872)..(960873): n is a or c or g or t.
  misc_feature (960879)..(960879): n is a or c or g or t.
  misc_feature (960890)..(960890): n is a or c or g or t.
  misc_feature (1250239)..(1250239): n is a or c or g or t.
  misc_feature (1302432)..(1302434): n is a or c or g or t.
  misc_feature (1302471)..(1302471): n is a or c or g or t.
  misc_feature (1302488)..(1302488): n is a or c or g or t.
  misc_feature (1674836)..(1674836): n is a or c or g or t.
MVKVGVIGLQGDVEEHIWAARRALENLGVSGDVIWLKKPEQLENISAIIIPGGESTTISRLMVKNGLFEPVKKLGEEGLPIMGTCAGLIMLSKEVIGATPEQKFLELLDVKVNRNAYGRQVDSFEAPIKLAFSGEPFPGVFIRAPRIVELLSERVKPIAWLGDRVVGVEQDNIIGLEFHPELTDDTRVHEYFLRKAV

SEQ ID NO: 1440 - protein, 499 aa, Thermococcus kodakaraensis KOD1
  misc_feature (321437)..(321437): n is a or c or g or t.
  misc_feature (527833)..(527833): n is a or c or g or t.
  misc_feature (527901)..(527901): n is a or c or g or t.
  misc_feature (527978)..(527978): n is a or c or g or t.
  misc_feature (960838)..(960839): n is a or c or g or t.
  misc_feature (960860)..(960861): n is a or c or g or t.
  misc_feature (960872)..(960873): n is a or c or g or t.
  misc_feature (960879)..(960879): n is a or c or g or t.
  misc_feature (960890)..(960890): n is a or c or g or t.
  misc_feature (1250239)..(1250239): n is a or c or g or t.
  misc_feature (1302432)..(1302434): n is a or c or g or t.
  misc_feature (1302471)..(1302471): n is a or c or g or t.
  misc_feature (1302488)..(1302488): n is a or c or g or t.
  misc_feature (1674836)..(1674836): n is a or c or g or t.
VYILAFNGSDPFIMAPKEYIQDVLTYFGPYNDSVVVGYVRDVFGPSLPYYTRDYSIMKFGNKLAKLEYLGNITNDSVLAVDLRLLSEFARESNFSAFYRAHLKEYSKATSNISAYINCAIPIYWRFFGKWYTKFRIEASYSVWIHPHASWENETSYYIGWISHNTTPRRLYGQVRRMFHEFAHPFVGEFLDENFQLFEGMDYYLDEIKKELPALTTYDTPHYGSFSRYLNELLTESIAKYAALKCGIPKDYMTYSTLLMSMYFPPLSKLLEEYDVVWKTNSTLPQYAPTLAEHMRTWATPTNISTLYWELSPVTWDHEWNTAFHYGRVVIVPGSSEQEREAAKTIKDALEDSYNEEFGQAPSIEIKAYDELTPEDTKANLILIGTPQTNDLVKELNDGLPVKFVFNGSWILQRDSASVKEFFSFEITNQSVKQLPLEYPTPSPWGVIETIRNPWNDRTYITVLAGTNESLIMQAFWRGFPSYVLVGDNYFEVGFYIQGG

SEQ ID NO: 1441 - protein, 659 aa, Thermococcus kodakaraensis KOD1
  misc_feature (321437)..(321437): n is a or c or g or t.
  misc_feature (527833)..(527833): n is a or c or g or t.
  misc_feature (527901)..(527901): n is a or c or g or t.
  misc_feature (527978)..(527978): n is a or c or g or t.
  misc_feature (960838)..(960839): n is a or c or g or t.
  misc_feature (960860)..(960861): n is a or c or g or t.
  misc_feature (960872)..(960873): n is a or c or g or t.
  misc_feature (960879)..(960879): n is a or c or g or t.
  misc_feature (960890)..(960890): n is a or c or g or t.
  misc_feature (1250239)..(1250239): n is a or c or g or t.
  misc_feature (1302432)..(1302434): n is a or c or g or t.
  misc_feature (1302471)..(1302471): n is a or c or g or t.
  misc_feature (1302488)..(1302488): n is a or c or g or t.
  misc_feature (1674836)..(1674836): n is a or c or g or t.
VKKVVCPYCGFGCKLLIDPATLKVKPYKGEPNKGKLCPKGLYSTEIVKSRDRLKRPLKRVGSKIVPISWGQAMEEISNKLLEVRELYGPDAVAFLASSKVSNEENYLLQKIARLFGTNNIDNCARLCHEASVHALKLAVGTGAQTNPYEDIPKFKSVLIWGYNPAETHPVVMDYILRAKKSGAKIIVVDVRETRTMAFADHRLIIRPGTDIVLANALAHVIIEEELYNEEFIRSRTTGFSEVRMAVKKYTPEYAERATGVPAEKIKEVARDFSLAGSGAEMWGMGLTQHVSGVENVLALINLALLLGYIGERGGLYPMRGQNNVQGAAYMGALSEFLPGYVPLTDGKFRKRVAGLWGVDDLPTERGLYLTELWDAIEKGDVRALYIVGENPAVSEADFMRVRRALRNLDLLVVQDIFPTRTARYAHYLLPASAFCEKAGSYMNSERRIQWSEKVCEPAYDSKPDWEILTMLGKALGLPGFNYTSVEEITAEYFRLFPELEEKSVEELKNSDGIFLPKKRLHTWEFATPDGKARFMAVEWIPPWEGPDDKYPFVLTTVRLIGHYNTGEMTLRSPSLVRLMGEPKALISREDAERLGIQNGDWVEVETRRGKIRMTAEIGDVPQGVIAVPFHFKANKLTSHALNKAGTPEFKFAAARVRKV

SEQ ID NO: 1442 - protein, 29 aa, Thermococcus kodakaraensis KOD1
  misc_feature (321437)..(321437): n is a or c or g or t.
  misc_feature (527833)..(527833): n is a or c or g or t.
  misc_feature (527901)..(527901): n is a or c or g or t.
  misc_feature (527978)..(527978): n is a or c or g or t.
  misc_feature (960838)..(960839): n is a or c or g or t.
  misc_feature (960860)..(960861): n is a or c or g or t.
  misc_feature (960872)..(960873): n is a or c or g or t.
  misc_feature (960879)..(960879): n is a or c or g or t.
  misc_feature (960890)..(960890): n is a or c or g or t.
  misc_feature (1250239)..(1250239): n is a or c or g or t.
  misc_feature (1302432)..(1302434): n is a or c or g or t.
  misc_feature (1302471)..(1302471): n is a or c or g or t.
  misc_feature (1302488)..(1302488): n is a or c or g or t.
  misc_feature (1674836)..(1674836): n is a or c or g or t.
VSTPFSGTESTNLESPIGVPSPVVRSNFY

SEQ ID NO: 1443 - protein, 83 aa, Thermococcus kodakaraensis KOD1
  misc_feature (321437)..(321437): n is a or c or g or t.
  misc_feature (527833)..(527833): n is a or c or g or t.
  misc_feature (527901)..(527901): n is a or c or g or t.
  misc_feature (527978)..(527978): n is a or c or g or t.
  misc_feature (960838)..(960839): n is a or c or g or t.
  misc_feature (960860)..(960861): n is a or c or g or t.
  misc_feature (960872)..(960873): n is a or c or g or t.
  misc_feature (960879)..(960879): n is a or c or g or t.
  misc_feature (960890)..(960890): n is a or c or g or t.
  misc_feature (1250239)..(1250239): n is a or c or g or t.
  misc_feature (1302432)..(1302434): n is a or c or g or t.
  misc_feature (1302471)..(1302471): n is a or c or g or t.
  misc_feature (1302488)..(1302488): n is a or c or g or t.
  misc_feature (1674836)..(1674836): n is a or c or g or t.
VMRMKWKVKVIVRLKEGLNDPEGRVIGNALKNLGFSVENLRVPKYFEFELESERPEEEVEEMCRKLLANPLIHEWEYSIEPVS

SEQ ID NO: 1444 - protein, 331 aa, Thermococcus kodakaraensis KOD1
  misc_feature (321437)..(321437): n is a or c or g or t.
  misc_feature (527833)..(527833): n is a or c or g or t.
  misc_feature (527901)..(527901): n is a or c or g or t.
  misc_feature (527978)..(527978): n is a or c or g or t.
  misc_feature (960838)..(960839): n is a or c or g or t.
  misc_feature (960860)..(960861): n is a or c or g or t.
  misc_feature (960872)..(960873): n is a or c or g or t.
  misc_feature (960879)..(960879): n is a or c or g or t.
  misc_feature (960890)..(960890): n is a or c or g or t.
  misc_feature (1250239)..(1250239): n is a or c or g or t.
  misc_feature (1302432)..(1302434): n is a or c or g or t.
  misc_feature (1302471)..(1302471): n is a or c or g or t.
  misc_feature (1302488)..(1302488): n is a or c or g or t.
  misc_feature (1674836)..(1674836): n is a or c or g or t.
MRVATYASHSALQILKGAKDEGFETVAFGPSRVKPLYTKYFPVADHFIEGAYPEEELLEFEAVVVPTGSFVAHLGVELVEKMKVPYYGNKAVLRWESDRSLERKWLEKAKLRLPRIYEDPDDIDGPVIVKPFGAGGGRGYFLASSPEDFWKKAERLGVRSKEDLSRVQIQEYVVGVPVYPHYFYSKLNGELELMSVDRRYESNADAIGRIPAREQIDLGISTDYTVVGNIPIVLRESLLMDVIEAGERVVKAAEELMGGLWGPFCLEGVFTPDMEFVVFEISARIVAGTNPFVHGSPYTWLRYDFPVSTGRRIAMELKQGLEEDRLGELLT

SEQ ID NO: 1445 - protein, 188 aa, Thermococcus kodakaraensis KOD1
  misc_feature (321437)..(321437): n is a or c or g or t.
  misc_feature (527833)..(527833): n is a or c or g or t.
  misc_feature (527901)..(527901): n is a or c or g or t.
  misc_feature (527978)..(527978): n is a or c or g or t.
  misc_feature (960838)..(960839): n is a or c or g or t.
  misc_feature (960860)..(960861): n is a or c or g or t.
  misc_feature (960872)..(960873): n is a or c or g or t.
  misc_feature (960879)..(960879): n is a or c or g or t.
  misc_feature (960890)..(960890): n is a or c or g or t.
  misc_feature (1250239)..(1250239): n is a or c or g or t.
  misc_feature (1302432)..(1302434): n is a or c or g or t.
  misc_feature (1302471)..(1302471): n is a or c or g or t.
  misc_feature (1302488)..(1302488): n is a or c or g or t.
  misc_feature (1674836)..(1674836): n is a or c or g or t.
MIVIMDNGGQYVHRIWRTLRYLGVEAKIIPNTTPLEEIKAMKPKGIIFSGGPDINKTGNCSAILEHYDEFNVPILGICLGHQLIAKHFGGKVGRGEKAEYSLVEIEILDENDIFRGLPRKLRVWESHMDEVKELPPGFKLLARSETCPVEAMKHESLPIYGVQFHPEVAHTEHGADIYRNFAELCGEL

SEQ ID NO: 1446 - protein, 286 aa, Thermococcus kodakaraensis KOD1
  misc_feature (321437)..(321437): n is a or c or g or t.
  misc_feature (527833)..(527833): n is a or c or g or t.
  misc_feature (527901)..(527901): n is a or c or g or t.
  misc_feature (527978)..(527978): n is a or c or g or t.
  misc_feature (960838)..(960839): n is a or c or g or t.
  misc_feature (960860)..(960861): n is a or c or g or t.
  misc_feature (960872)..(960873): n is a or c or g or t.
  misc_feature (960879)..(960879): n is a or c or g or t.
  misc_feature (960890)..(960890): n is a or c or g or t.
  misc_feature (1250239)..(1250239): n is a or c or g or t.
  misc_feature (1302432)..(1302434): n is a or c or g or t.
  misc_feature (1302471)..(1302471): n is a or c or g or t.
  misc_feature (1302488)..(1302488): n is a or c or g or t.
  misc_feature (1674836)..(1674836): n is a or c or g or t.
MSFQVETMYIRPFDPWKSPLCTCPFKYTLNPYTGCDHACVYCYITSYIPNAFRVRTKEGLLPKLEKELRKLDKNAIVALSYSSDPYPTIERELGITRKVLELFRGYNVRCLLLTKSDIFERDIDILSELRCAVGVTVTTVDEKKAKLLEPNAPSPKRRMKALKKAKDAGIPVYARIDPIIPYYTWEDFDETLDALSFVSHITVSTLKLRPDSKKRMFAKFPELMEKLWPLYERGERIGGYYYLPKDVRMPILREAEKKITEKGITFGSCREGYRSFPTCDGSHLVP

SEQ ID NO: 1447 - protein, 421 aa, Thermococcus kodakaraensis KOD1
  misc_feature (321437)..(321437): n is a or c or g or t.
  misc_feature (527833)..(527833): n is a or c or g or t.
  misc_feature (527901)..(527901): n is a or c or g or t.
  misc_feature (527978)..(527978): n is a or c or g or t.
  misc_feature (960838)..(960839): n is a or c or g or t.
  misc_feature (960860)..(960861): n is a or c or g or t.
  misc_feature (960872)..(960873): n is a or c or g or t.
  misc_feature (960879)..(960879): n is a or c or g or t.
  misc_feature (960890)..(960890): n is a or c or g or t.
  misc_feature (1250239)..(1250239): n is a or c or g or t.
  misc_feature (1302432)..(1302434): n is a or c or g or t.
  misc_feature (1302471)..(1302471): n is a or c or g or t.
  misc_feature (1302488)..(1302488): n is a or c or g or t.
  misc_feature (1674836)..(1674836): n is a or c or g or t.
MMKAYIAENVRGIYAFDESGKLIGSKPFSGKPEVSLDKLLKGEPSDELIEFLDELGSEGYTEFVVEDSELSRNLKELGYNATAEFPNIAGEKLRSSPEEFLGENWFDEYFSVGVALTRLRIQEQSGARDKMIIQAIEALDDIDKVINLLVSRLREWYGLHFPELDELLPKHPQYVAFVKEIGPRENATREKLEKLGFSEGKIEKILEAAEKSMGAPLGKFDSAIIQKLASEIHDLYKLREQIEDYLETAMDEVAPNLKALVGAKLAARLMSLAGGLKELAMMPASTIQVLGAEKALFRHLRTGAKPPKHGVIFQYPAINRSPWWQRGKIARALAGKLAIAARVDYFSGEYIGEELKKELEQRIQEIKEKYPNPPKRKAKPEKKKKEKKKFKGKGKGKHEKGKGFGGKKDKKKKKKGKGGKR

SEQ ID NO: 1448 - protein, 134 aa, Thermococcus kodakaraensis KOD1
  misc_feature (321437)..(321437): n is a or c or g or t.
  misc_feature (527833)..(527833): n is a or c or g or t.
  misc_feature (527901)..(527901): n is a or c or g or t.
  misc_feature (527978)..(527978): n is a or c or g or t.
  misc_feature (960838)..(960839): n is a or c or g or t.
  misc_feature (960860)..(960861): n is a or c or g or t.
  misc_feature (960872)..(960873): n is a or c or g or t.
  misc_feature (960879)..(960879): n is a or c or g or t.
  misc_feature (960890)..(960890): n is a or c or g or t.
  misc_feature (1250239)..(1250239): n is a or c or g or t.
  misc_feature (1302432)..(1302434): n is a or c or g or t.
  misc_feature (1302471)..(1302471): n is a or c or g or t.
  misc_feature (1302488)..(1302488): n is a or c or g or t.
  misc_feature (1674836)..(1674836): n is a or c or g or t.
MGRPMQVARHWRHFREKYALIGGKCENDHVFFPKRPVCPVCGSRNVEEYQFSGKGKVISWTIVRNPPSGFEYYKPYPLALVELEEGLVVLAQLTDVDPEEIHEGMEVEMVTRKIREFGEDGIILYGYKFRPPMK

SEQ ID NO: 1449 - protein, 353 aa, Thermococcus kodakaraensis KOD1
  misc_feature (321437)..(321437): n is a or c or g or t.
  misc_feature (527833)..(527833): n is a or c or g or t.
  misc_feature (527901)..(527901): n is a or c or g or t.
  misc_feature (527978)..(527978): n is a or c or g or t.
  misc_feature (960838)..(960839): n is a or c or g or t.
  misc_feature (960860)..(960861): n is a or c or g or t.
  misc_feature (960872)..(960873): n is a or c or g or t.
  misc_feature (960879)..(960879): n is a or c or g or t.
  misc_feature (960890)..(960890): n is a or c or g or t.
  misc_feature (1250239)..(1250239): n is a or c or g or t.
  misc_feature (1302432)..(1302434): n is a or c or g or t.
  misc_feature (1302471)..(1302471): n is a or c or g or t.
  misc_feature (1302488)..(1302488): n is a or c or g or t.
  misc_feature (1674836)..(1674836): n is a or c or g or t.
MEDALRKYQLRLEESQKEALKIRKNYQKWLSKKKKELKRAVEKLEKVKPPKNVDETLLKIVEADRRAYVSAFKRALEGIQDIEDLGKRLPELGKVHIDYGKHVIILFEKEVLAINSILKEMDEGYREYLQETQRISLPKLEVEEKIEELKTVKEKLSFINSEIESLLEEISLKRKEIEQERQKPEVKSIEGQLENLITKKKKLEMEVRSNVSKIQKTLKRLRMGGLADQLARDSGVALEKPGEVVSLLQTLKPRFEGKARKSVEWLSENLESTVSEIKELDRKIHELRSAMEKELSRAGHLEDEISFLERRTAELESEKKKLEKLKARLEEEIQQEVKLLEKALGEEIEWGNI

SEQ ID NO: 1450 - protein, 284 aa, Thermococcus kodakaraensis KOD1
  misc_feature (321437)..(321437): n is a or c or g or t.
  misc_feature (527833)..(527833): n is a or c or g or t.
  misc_feature (527901)..(527901): n is a or c or g or t.
  misc_feature (527978)..(527978): n is a or c or g or t.
  misc_feature (960838)..(960839): n is a or c or g or t.
  misc_feature (960860)..(960861): n is a or c or g or t.
  misc_feature (960872)..(960873): n is a or c or g or t.
  misc_feature (960879)..(960879): n is a or c or g or t.
  misc_feature (960890)..(960890): n is a or c or g or t.
  misc_feature (1250239)..(1250239): n is a or c or g or t.
  misc_feature (1302432)..(1302434): n is a or c or g or t.
  misc_feature (1302471)..(1302471): n is a or c or g or t.
  misc_feature (1302488)..(1302488): n is a or c or g or t.
  misc_feature (1674836)..(1674836): n is a or c or g or t.
VVSMFKVDRLRFGTAGIPLSTPKPSTITGIEHVRNLGLDAMELEFVRGVNISPELAKKIKYVAKKNDVLLTAHAPYYINLNAKEKAKVEASKKRIIQSAERLYEAGGWSVVFHAGYYLKQPPESVYQRILEALKDIQKELMDKGVKVWIRPELTGKPTQFGDLKEIVKLSEELEMVLPTIDFAHAHARNRGKCNSVEEWREMLSFIEDRLGREALDNMHIHMSGIEYTDKGEKRHLPLQESDMNWEDLLRVLKEFRVKGVVISESPNIEEDALLMKKKYEEIKA

SEQ ID NO: 1451 - protein, 220 aa, Thermococcus kodakaraensis KOD1
  misc_feature (321437)..(321437): n is a or c or g or t.
  misc_feature (527833)..(527833): n is a or c or g or t.
  misc_feature (527901)..(527901): n is a or c or g or t.
  misc_feature (527978)..(527978): n is a or c or g or t.
  misc_feature (960838)..(960839): n is a or c or g or t.
  misc_feature (960860)..(960861): n is a or c or g or t.
  misc_feature (960872)..(960873): n is a or c or g or t.
  misc_feature (960879)..(960879): n is a or c or g or t.
  misc_feature (960890)..(960890): n is a or c or g or t.
  misc_feature (1250239)..(1250239): n is a or c or g or t.
  misc_feature (1302432)..(1302434): n is a or c or g or t.
  misc_feature (1302471)..(1302471): n is a or c or g or t.
  misc_feature (1302488)..(1302488): n is a or c or g or t.
  misc_feature (1674836)..(1674836): n is a or c or g or t.
MITAKNLSKRFGKLVALDSISVKIERGFTLILGPNGGGKSTFLKLCAGLYRPSSGRVEVLGEAPWSNERVKSRLGVSFDPPALPKHRTGREWLDYIARLKGADDDNVLESAEMFSVTGFLDRRIGEYSAGMMKRLSLAQAFIGKPELVLLDEPLANLDFRGINEVSETLGRLANDGLNIVAVSHVWRPLMKFANEVVVIAAGRAVLKGSPEEVIPKIEGL

SEQ ID NO: 1452 - protein, 334 aa, Thermococcus kodakaraensis KOD1
  misc_feature (321437)..(321437): n is a or c or g or t.
  misc_feature (527833)..(527833): n is a or c or g or t.
  misc_feature (527901)..(527901): n is a or c or g or t.
  misc_feature (527978)..(527978): n is a or c or g or t.
  misc_feature (960838)..(960839): n is a or c or g or t.
  misc_feature (960860)..(960861): n is a or c or g or t.
  misc_feature (960872)..(960873): n is a or c or g or t.
  misc_feature (960879)..(960879): n is a or c or g or t.
  misc_feature (960890)..(960890): n is a or c or g or t.
  misc_feature (1250239)..(1250239): n is a or c or g or t.
  misc_feature (1302432)..(1302434): n is a or c or g or t.
  misc_feature (1302471)..(1302471): n is a or c or g or t.
  misc_feature (1302488)..(1302488): n is a or c or g or t.
  misc_feature (1674836)..(1674836): n is a or c or g or t.
MVRVRLVGIRKSFEGFTLEIPELEVESGEMMTLLGPSGCGKTTTLRIIAGLEKPDSGRVFFDETDVTNLEPGKRNIGIVFQDYALFPHMTVFENVAFGLEMRKLPRDEIKKKVEWALELVGLKGFENRYPEQLSGGQQQRVALARALVIEPQVLLLDEPLSNLDAKIRERLRGEIRRIQKELGITTIYVTHDQEEAMAVSDRIAVMNSGRIEGIGKPLELYYHPKTEFVAKFLGLSNILELEAENGIARLGTLEFKTGRDGKVRVFFRPENVLVKPGKGARVIDYDLLPGRIRLRLGIGGETITAERFLNELPFSPEDIPKEVSVEVLSYSVLE

SEQ ID NO: 1453 - protein, 255 aa, Thermococcus kodakaraensis KOD1
  misc_feature (321437)..(321437): n is a or c or g or t.
  misc_feature (527833)..(527833): n is a or c or g or t.
  misc_feature (527901)..(527901): n is a or c or g or t.
  misc_feature (527978)..(527978): n is a or c or g or t.
  misc_feature (960838)..(960839): n is a or c or g or t.
  misc_feature (960860)..(960861): n is a or c or g or t.
  misc_feature (960872)..(960873): n is a or c or g or t.
  misc_feature (960879)..(960879): n is a or c or g or t.
  misc_feature (960890)..(960890): n is a or c or g or t.
  misc_feature (1250239)..(1250239): n is a or c or g or t.
  misc_feature (1302432)..(1302434): n is a or c or g or t.
  misc_feature (1302471)..(1302471): n is a or c or g or t.
  misc_feature (1302488)..(1302488): n is a or c or g or t.
  misc_feature (1674836)..(1674836): n is a or c or g or t.
MPSSEQLHSTGLSPLEDQKTINLRAPSIGGRSMDVFEEIEKREKRLNAIIEIAEDRLKHIEELGVKAKGPQIKDYSAYYVLITLVGMILGTAVLVIVSRRIESGIKIPIKLYVVLMLLFAIPVVYYLLFKRKPGESPGSDLVERERMARTLLERFYKPLKEAVQADDKAKIEELANRLLEDPILASSMEILNEGDPKVVAYALLLYARYEPGLENEVKETLSIVTNKPAKALLETLLRKGYNPQEQSKIGGDREA

SEQ ID NO: 1454 - protein, 50 aa, Thermococcus kodakaraensis KOD1
  misc_feature (321437)..(321437): n is a or c or g or t.
  misc_feature (527833)..(527833): n is a or c or g or t.
  misc_feature (527901)..(527901): n is a or c or g or t.
  misc_feature (527978)..(527978): n is a or c or g or t.
  misc_feature (960838)..(960839): n is a or c or g or t.
  misc_feature (960860)..(960861): n is a or c or g or t.
  misc_feature (960872)..(960873): n is a or c or g or t.
  misc_feature (960879)..(960879): n is a or c or g or t.
  misc_feature (960890)..(960890): n is a or c or g or t.
  misc_feature (1250239)..(1250239): n is a or c or g or t.
  misc_feature (1302432)..(1302434): n is a or c or g or t.
  misc_feature (1302471)..(1302471): n is a or c or g or t.
  misc_feature (1302488)..(1302488): n is a or c or g or t.
  misc_feature (1674836)..(1674836): n is a or c or g or t.
VEEMAVLKAIKIEDRDGEILFRCPRCGMVFRSAKAYTRHVNKAHGHLFRK

SEQ ID NO: 1455 - protein, 458 aa, Thermococcus kodakaraensis KOD1
  misc_feature (321437)..(321437): n is a or c or g or t.
  misc_feature (527833)..(527833): n is a or c or g or t.
  misc_feature (527901)..(527901): n is a or c or g or t.
  misc_feature (527978)..(527978): n is a or c or g or t.
  misc_feature (960838)..(960839): n is a or c or g or t.
  misc_feature (960860)..(960861): n is a or c or g or t.
  misc_feature (960872)..(960873): n is a or c or g or t.
  misc_feature (960879)..(960879): n is a or c or g or t.
  misc_feature (960890)..(960890): n is a or c or g or t.
  misc_feature (1250239)..(1250239): n is a or c or g or t.
  misc_feature (1302432)..(1302434): n is a or c or g or t.
  misc_feature (1302471)..(1302471): n is a or c or g or t.
  misc_feature (1302488)..(1302488): n is a or c or g or t.
  misc_feature (1674836)..(1674836): n is a or c or g or t.
MTFDYFFKPRGIAVIGASNDPLKLGYEVFKNLKKYKAGKVYPVNVKDEVVQGVKAYKNIKDIPGEVDLAIIVVPKRFVKGAIIDAGEKGVKGAVIITAGFGETGEEGKREERELVEIAHKYGMRIIGPNCVGVMNTQDDMNATFIMDAKKGSIAFISQSGALGAGIVYKTVKEGIGFSKFVSIGNMADVDFSELMEYLADTKEDKAIALYIEGLKDGRKFIDVAKRVTKKKPVIALKAGRSESGARAASSHTGSLAGSWKIYEAAFKQSGVLVADTIDDMLSMARAFTQPLPKGKRVAIMTNAGGPGVLTADAIDRKGLKLANLEEKTIEELRSFLPPMAAVKNPVDMIASARGEDYYRTAKLLLRDPNVDMLIAICVVPTFAGMTPTEHAEGVIKAVKEVNNGKPVLGLFMAGYVSEKAKELLEANGIPSYERPEDVAAGAYALVQQAKNVGLLREE

SEQ ID NO: 1456 - protein, 169 aa, Thermococcus kodakaraensis KOD1
  misc_feature (321437)..(321437): n is a or c or g or t.
  misc_feature (527833)..(527833): n is a or c or g or t.
  misc_feature (527901)..(527901): n is a or c or g or t.
  misc_feature (527978)..(527978): n is a or c or g or t.
  misc_feature (960838)..(960839): n is a or c or g or t.
  misc_feature (960860)..(960861): n is a or c or g or t.
  misc_feature (960872)..(960873): n is a or c or g or t.
  misc_feature (960879)..(960879): n is a or c or g or t.
  misc_feature (960890)..(960890): n is a or c or g or t.
  misc_feature (1250239)..(1250239): n is a or c or g or t.
  misc_feature (1302432)..(1302434): n is a or c or g or t.
  misc_feature (1302471)..(1302471): n is a or c or g or t.
  misc_feature (1302488)..(1302488): n is a or c or g or t.
  misc_feature (1674836)..(1674836): n is a or c or g or t.
MTAKNEEVKIEKLQKLDQETLERLIEIYMSAYEGMREYGGEGESYAKRYLRWCWGKAKDGFFVAKIGDRIVGFIVCDKDWYSKYEGKTVGAIHEFAVDKAYQGHGIGHKLMDKCLEYLKDTGRIELWVGEKNYGAMKFYEKYGFKKVGQHGIWVRMVKDTKKEIKREEK

SEQ ID NO: 1457 - protein, 96 aa, Thermococcus kodakaraensis KOD1
  misc_feature (321437)..(321437): n is a or c or g or t.
  misc_feature (527833)..(527833): n is a or c or g or t.
  misc_feature (527901)..(527901): n is a or c or g or t.
  misc_feature (527978)..(527978): n is a or c or g or t.
  misc_feature (960838)..(960839): n is a or c or g or t.
  misc_feature (960860)..(960861): n is a or c or g or t.
  misc_feature (960872)..(960873): n is a or c or g or t.
  misc_feature (960879)..(960879): n is a or c or g or t.
  misc_feature (960890)..(960890): n is a or c or g or t.
  misc_feature (1250239)..(1250239): n is a or c or g or t.
  misc_feature (1302432)..(1302434): n is a or c or g or t.
  misc_feature (1302471)..(1302471): n is a or c or g or t.
  misc_feature (1302488)..(1302488): n is a or c or g or t.
  misc_feature (1674836)..(1674836): n is a or c or g or t.
MPCIHPPTPEKVKDMKEESFIREGKGKLKVTIEGEETLETTMNGSLKSVEEVAEMLGVEAKDGKIDTVVDGVKVRMQKGKLELEFESGEKMKIERA

SEQ ID NO: 1458 - protein, 157 aa, Thermococcus kodakaraensis KOD1
  misc_feature (321437)..(321437): n is a or c or g or t.
  misc_feature (527833)..(527833): n is a or c or g or t.
  misc_feature (527901)..(527901): n is a or c or g or t.
  misc_feature (527978)..(527978): n is a or c or g or t.
  misc_feature (960838)..(960839): n is a or c or g or t.
  misc_feature (960860)..(960861): n is a or c or g or t.
  misc_feature (960872)..(960873): n is a or c or g or t.
  misc_feature (960879)..(960879): n is a or c or g or t.
  misc_feature (960890)..(960890): n is a or c or g or t.
  misc_feature (1250239)..(1250239): n is a or c or g or t.
  misc_feature (1302432)..(1302434): n is a or c or g or t.
  misc_feature (1302471)..(1302471): n is a or c or g or t.
  misc_feature (1302488)..(1302488): n is a or c or g or t.
  misc_feature (1674836)..(1674836): n is a or c or g or t.
MGGIKVKVMRPIFKPEVAESFVLYPYRIYHLRLFYKRLGMKDRVFDYYAYIDLYRLGAERGDDFIDLEEWEVDEKNVMEPLVTEEEARMKAFESAITWGNSRVVSWWLPRIEVIREELAYKVFWVYEEDGKKLIMDSLDGKSYELTGERKCRGFPCR

SEQ ID NO: 1459 - protein, 54 aa, Thermococcus kodakaraensis KOD1
  misc_feature (321437)..(321437): n is a or c or g or t.
  misc_feature (527833)..(527833): n is a or c or g or t.
  misc_feature (527901)..(527901): n is a or c or g or t.
  misc_feature (527978)..(527978): n is a or c or g or t.
  misc_feature (960838)..(960839): n is a or c or g or t.
  misc_feature (960860)..(960861): n is a or c or g or t.
  misc_feature (960872)..(960873): n is a or c or g or t.
  misc_feature (960879)..(960879): n is a or c or g or t.
  misc_feature (960890)..(960890): n is a or c or g or t.
  misc_feature (1250239)..(1250239): n is a or c or g or t.
  misc_feature (1302432)..(1302434): n is a or c or g or t.
  misc_feature (1302471)..(1302471): n is a or c or g or t.
  misc_feature (1302488)..(1302488): n is a or c or g or t.
  misc_feature (1674836)..(1674836): n is a or c or g or t.
VIPMNQNLKACKNCRWFGPIDSCLPNHGICRKHMKTVHMNFVCDDWEPLWGERE

SEQ ID NO: 1460 - protein, 180 aa, Thermococcus kodakaraensis KOD1
  misc_feature (321437)..(321437): n is a or c or g or t.
  misc_feature (527833)..(527833): n is a or c or g or t.
  misc_feature (527901)..(527901): n is a or c or g or t.
  misc_feature (527978)..(527978): n is a or c or g or t.
  misc_feature (960838)..(960839): n is a or c or g or t.
  misc_feature (960860)..(960861): n is a or c or g or t.
  misc_feature (960872)..(960873): n is a or c or g or t.
  misc_feature (960879)..(960879): n is a or c or g or t.
  misc_feature (960890)..(960890): n is a or c or g or t.
  misc_feature (1250239)..(1250239): n is a or c or g or t.
  misc_feature (1302432)..(1302434): n is a or c or g or t.
  misc_feature (1302471)..(1302471): n is a or c or g or t.
  misc_feature (1302488)..(1302488): n is a or c or g or t.
  misc_feature (1674836)..(1674836): n is a or c or g or t.
VRKMIAVLRLGHRPERDKRITTHVALTARAFGADKIIIAAEEDEHVKESVEDVVNRWGGPFEIEFNPSWKKILREWKDRGIIVHLTMYGIHIDDAIPRIKDELKSGKDLLIVVGAEKVPREVYEMADYNVAVGNQPHSEVAALAVFLDRLLDGAGLRKEFHNAKLKIVPQERGKKVLQLE

SEQ ID NO: 1461 - protein, 93 aa, Thermococcus kodakaraensis KOD1
  misc_feature (321437)..(321437): n is a or c or g or t.
  misc_feature (527833)..(527833): n is a or c or g or t.
  misc_feature (527901)..(527901): n is a or c or g or t.
  misc_feature (527978)..(527978): n is a or c or g or t.
  misc_feature (960838)..(960839): n is a or c or g or t.
  misc_feature (960860)..(960861): n is a or c or g or t.
  misc_feature (960872)..(960873): n is a or c or g or t.
  misc_feature (960879)..(960879): n is a or c or g or t.
  misc_feature (960890)..(960890): n is a or c or g or t.
  misc_feature (1250239)..(1250239): n is a or c or g or t.
  misc_feature (1302432)..(1302434): n is a or c or g or t.
  misc_feature (1302471)..(1302471): n is a or c or g or t.
  misc_feature (1302488)..(1302488): n is a or c or g or t.
  misc_feature (1674836)..(1674836): n is a or c or g or t.
VMDIEAILLVWGVRDEILRELPVEGQWLYGEYDFIARVDFSSDSEMEDFERLLRKIINGNTFKLMPVKLSASKTDVNGEEKITILESVKVSAP

SEQ ID NO: 1462 - protein, 58 aa, Thermococcus kodakaraensis KOD1
  misc_feature (321437)..(321437): n is a or c or g or t.
  misc_feature (527833)..(527833): n is a or c or g or t.
  misc_feature (527901)..(527901): n is a or c or g or t.
  misc_feature (527978)..(527978): n is a or c or g or t.
  misc_feature (960838)..(960839): n is a or c or g or t.
  misc_feature (960860)..(960861): n is a or c or g or t.
  misc_feature (960872)..(960873): n is a or c or g or t.
  misc_feature (960879)..(960879): n is a or c or g or t.
  misc_feature (960890)..(960890): n is a or c or g or t.
  misc_feature (1250239)..(1250239): n is a or c or g or t.
  misc_feature (1302432)..(1302434): n is a or c or g or t.
  misc_feature (1302471)..(1302471): n is a or c or g or t.
  misc_feature (1302488)..(1302488): n is a or c or g or t.
  misc_feature (1674836)..(1674836): n is a or c or g or t.
VQKMRRRAQGALEYLFMLAAVLVLVAIAIRVATNSTNELNKSVTNYTKEIRKKILEDL

SEQ ID NO: 1463 - protein, 247 aa, Thermococcus kodakaraensis KOD1
  misc_feature (321437)..(321437): n is a or c or g or t.
  misc_feature (527833)..(527833): n is a or c or g or t.
  misc_feature (527901)..(527901): n is a or c or g or t.
  misc_feature (527978)..(527978): n is a or c or g or t.
  misc_feature (960838)..(960839): n is a or c or g or t.
  misc_feature (960860)..(960861): n is a or c or g or t.
  misc_feature (960872)..(960873): n is a or c or g or t.
  misc_feature (960879)..(960879): n is a or c or g or t.
  misc_feature (960890)..(960890): n is a or c or g or t.
  misc_feature (1250239)..(1250239): n is a or c or g or t.
  misc_feature (1302432)..(1302434): n is a or c or g or t.
  misc_feature (1302471)..(1302471): n is a or c or g or t.
  misc_feature (1302488)..(1302488): n is a or c or g or t.
  misc_feature (1674836)..(1674836): n is a or c or g or t.
MEKELDLREVLATGEQIQEIIARAIIDREFLKEVISLLDDDLWTVQKNALRVISAIMEEIPSLQEALVTKLMVMVRKSEAVPLTQEIARTFGLLARINPEEVRKVVPIIFANYRLGDPKIKINMTYVLEEIMRANPSLLSGVFKDIGILLTSKNNADKLAALNFIAALGDNGLKYVTPFLPKLFALLNDKDEVVRASAVETLEKLAEKNKKLRAIVIEKLKEMKDPSDLVKHKVEEALSRLLLLEKE

SEQ ID NO: 1464 - protein, 527 aa, Thermococcus kodakaraensis KOD1
  misc_feature (321437)..(321437): n is a or c or g or t.
  misc_feature (527833)..(527833): n is a or c or g or t.
  misc_feature (527901)..(527901): n is a or c or g or t.
  misc_feature (527978)..(527978): n is a or c or g or t.
  misc_feature (960838)..(960839): n is a or c or g or t.
  misc_feature (960860)..(960861): n is a or c or g or t.
  misc_feature (960872)..(960873): n is a or c or g or t.
  misc_feature (960879)..(960879): n is a or c or g or t.
  misc_feature (960890)..(960890): n is a or c or g or t.
  misc_feature (1250239)..(1250239): n is a or c or g or t.
  misc_feature (1302432)..(1302434): n is a or c or g or t.
  misc_feature (1302471)..(1302471): n is a or c or g or t.
  misc_feature (1302488)..(1302488): n is a or c or g or t.
  misc_feature (1674836)..(1674836): n is a or c or g or t.
VWPRRYGRRTEYCSKDDFINFTVKRVTMEELIKLIHLERKPALTPERKVKDFLKTLQRTKNGEDIRVRGFIILRKPPNAPRDGIYYLLSPLAPSEMKSYREPRAYLVVKINEDTRIDARIQPGEYVEAEGILDAYPFGTLRLLHARRISPADYSEYWKDYRSLALSKSELENLVSDTIYASYELERAIMYSILTAPFVVGTNWLDGFTLSGFKGLDGSKNVTLSLWEALKYIYSLLPWEMQLRRDRWGEVKDDGLLGIDFRFTRPSRAGPLYYVPHNKTLLESEVPVPKWALKTFEKKEATFLTPRAGIRPEDEAALLAETPFVLTEPVSYEKNRELEELIPNLIVTVMLARERLGTLNPWELKDYGRKFESFLAKNRREYGELFDALTLSGKVFNANLRYRLGARLLGSMARLEGRLSKPLITDLIGIYQELTDLWVNELPEREKLRLVREYERYVGSDKLAGRALGIFADLEATRKDGTVSREEFISALVEYGIAKGKAEEIVDNLLREGYLYEPLQGKLRLIRW

SEQ ID NO: 1465 - protein, 532 aa, Thermococcus kodakaraensis KOD1
  misc_feature (321437)..(321437): n is a or c or g or t.
  misc_feature (527833)..(527833): n is a or c or g or t.
  misc_feature (527901)..(527901): n is a or c or g or t.
  misc_feature (527978)..(527978): n is a or c or g or t.
  misc_feature (960838)..(960839): n is a or c or g or t.
  misc_feature (960860)..(960861): n is a or c or g or t.
  misc_feature (960872)..(960873): n is a or c or g or t.
  misc_feature (960879)..(960879): n is a or c or g or t.
  misc_feature (960890)..(960890): n is a or c or g or t.
  misc_feature (1250239)..(1250239): n is a or c or g or t.
  misc_feature (1302432)..(1302434): n is a or c or g or t.
  misc_feature (1302471)..(1302471): n is a or c or g or t.
  misc_feature (1302488)..(1302488): n is a or c or g or t.
  misc_feature (1674836)..(1674836): n is a or c or g or t.
MGEEGSVDLWTYRDVVGVPVGCELEIYLKSELPDFPPQVLVPPASVAGINEDGISLMNPNKSRGTSWVEVSAVSELSNSHRFHQRGLFSKQINLPGERLLSSSVELRAVKFMDCTKDYCVKDISLAPSGEKKIDWVSRFMPVLQHIRKDFEERKPFKGVRIAATLHLEMKTAFLLLTLKAAGAEVSAAASNPLSTQDDVVAALAKAGVKVYAIRGEDREQYYEFMHKALDVKPNIIIDDGADMVSTVLKERQELIPEIWGASEETTTGVIRLRAMEKDGVLKFPIIAVNDSYTKYLFDNRYGTGQSTWDGIIRTTNLLVAGKNVVVVGYGWCGRGIAMRARGLGATVIVVEVDPIRALEARMDGFLVMDMMEAAKVGDIFITATGDINCIRKEHFELMKDGAILANAGHFDVEISKPDLEALAVEISEPRPNITEYKMADGRRLYLLAEGRLVNLAAADGHPAEIMDMSFALQAKAAEYIKENRGRLEPKVYVLPREIDEMVARIKLASMGIKIEELTEEQKKYLESWEHGT

SEQ ID NO: 1466 - protein, 218 aa, Thermococcus kodakaraensis KOD1
  misc_feature (321437)..(321437): n is a or c or g or t.
  misc_feature (527833)..(527833): n is a or c or g or t.
  misc_feature (527901)..(527901): n is a or c or g or t.
  misc_feature (527978)..(527978): n is a or c or g or t.
  misc_feature (960838)..(960839): n is a or c or g or t.
  misc_feature (960860)..(960861): n is a or c or g or t.
  misc_feature (960872)..(960873): n is a or c or g or t.
  misc_feature (960879)..(960879): n is a or c or g or t.
  misc_feature (960890)..(960890): n is a or c or g or t.
  misc_feature (1250239)..(1250239): n is a or c or g or t.
  misc_feature (1302432)..(1302434): n is a or c or g or t.
  misc_feature (1302471)..(1302471): n is a or c or g or t.
  misc_feature (1302488)..(1302488): n is a or c or g or t.
  misc_feature (1674836)..(1674836): n is a or c or g or t.
MEFEPLKIVPLGYVRKDEELHETFIEILPEFRGAIDGLREGDWIKLVLWFHESDTPARRRVLKVHPYGNPKNPLTGVFATRSPYRPNPIALYTVRVHRIDENRLYIDWIDAHDGTPVVDIKIFVERYDCPKEVPIEEREAHIREGRMIGEVNIIPRRSEHLDELEEVSPGEYDALILEIGPKTTTLTAKELKDLIEALKEVYDSLPVEIKDKLGELKC

SEQ ID NO: 1467 - protein, 71 aa, Thermococcus kodakaraensis KOD1
  misc_feature (321437)..(321437): n is a or c or g or t.
  misc_feature (527833)..(527833): n is a or c or g or t.
  misc_feature (527901)..(527901): n is a or c or g or t.
  misc_feature (527978)..(527978): n is a or c or g or t.
  misc_feature (960838)..(960839): n is a or c or g or t.
  misc_feature (960860)..(960861): n is a or c or g or t.
  misc_feature (960872)..(960873): n is a or c or g or t.
  misc_feature (960879)..(960879): n is a or c or g or t.
  misc_feature (960890)..(960890): n is a or c or g or t.
  misc_feature (1250239)..(1250239): n is a or c or g or t.
  misc_feature (1302432)..(1302434): n is a or c or g or t.
  misc_feature (1302471)..(1302471): n is a or c or g or t.
  misc_feature (1302488)..(1302488): n is a or c or g or t.
  misc_feature (1674836)..(1674836): n is a or c or g or t.
VGDIVVKVPPSVDEKLADLIAKTIAERLKTLARLNEMLKNSELSEEDAIELGRKAKMGRGEYLERRYSSRS

SEQ ID NO: 1468 - protein, 154 aa, Thermococcus kodakaraensis KOD1
  misc_feature (321437)..(321437): n is a or c or g or t.
  misc_feature (527833)..(527833): n is a or c or g or t.
  misc_feature (527901)..(527901): n is a or c or g or t.
  misc_feature (527978)..(527978): n is a or c or g or t.
  misc_feature (960838)..(960839): n is a or c or g or t.
  misc_feature (960860)..(960861): n is a or c or g or t.
  misc_feature (960872)..(960873): n is a or c or g or t.
  misc_feature (960879)..(960879): n is a or c or g or t.
  misc_feature (960890)..(960890): n is a or c or g or t.
  misc_feature (1250239)..(1250239): n is a or c or g or t.
  misc_feature (1302432)..(1302434): n is a or c or g or t.
  misc_feature (1302471)..(1302471): n is a or c or g or t.
  misc_feature (1302488)..(1302488): n is a or c or g or t.
  misc_feature (1674836)..(1674836): n is a or c or g or t.
VENPSVVAIYSETVRSWKMLLIMLPAFLGMTIGIGASYLAGEDMTFLLVFLLPFVAIALDLMQLKIEVDEERLKIRSALGLLARKTIRLDEIKLVRISEGWMSCSGTIHYTYPGKACVLIERTKGWSISFTTNRPEELAEVLRTLGVPVVGGSP

SEQ ID NO: 1469 - DNA, 2089378 bp, Thermococcus kodakaraensis KOD1; identical to SEQ ID NO: 1087
  CDS (15641)..(15844): Histones H3 and H4
  CDS (18650)..(19189): ADP-ribose pyrophosphatase
  CDS (43346)..(44251): UDP-N-acetylmuramyl pentapeptide phosphotransferase/UDP-N- acetyl glucosamine-1-phosphate transferase
  CDS (55958)..(56644): SAM-dependent methyltransferases COG0500 SmtA
  CDS (58355)..(59236): Transcriptional regulators
  CDS (74717)..(75769): Predicted methyltransferase
  CDS (75806)..(76666): Predicted ATPase of the AAA superfamily
  CDS (82763)..(84190): 7-keto-8-aminopelargonate synthetase and related enzymes
  CDS (88286)..(89668): DNA repair exonuclease
  CDS (94694)..(95422): ABC-type cobalamin/Fe3+-siderophores transport systems
  CDS (95450)..(96058): Proteasome protease subunit
  CDS (97349)..(98335): Threonine synthase
  CDS (99707)..(100495): Phosphomannomutase
  CDS (105053)..(105805): Predicted metal-binding domain (associated with helicases in Pyro coccus and Mtub)
  CDS (110978)..(111559): Uncharacterized ACR
  CDS (111674)..(111982): Predicted transcriptional regulators
  CDS (129398)..(129994): Nucleoside-diphosphate-sugar pyrophosphorylases involved in lipop olysaccharide biosynthesis/translation initiation factor eIF2B su bunits COG1208 GCD1
  CDS (130403)..(130924): ELP3 component of the RNA polymerase II complex
  CDS (143513)..(144649): Uncharacterized ACR
  CDS (157376)..(157843): Uncharacterized ArCR
  CDS (166313)..(167971): Na+/H+ antiporter
  CDS (168047)..(168949): Predicted archaeal kinases of the sugar kinase superfamily
  CDS (173174)..(174496): SAM-dependent methyltransferases related to tRNA (uracil-5-)-meth yltransferase
  CDS (174566)..(174991): Transcriptional regulators
  CDS (175328)..(175906): Ribosomal protein L22
  CDS (187658)..(188173): CDP-diglyceride synthetase
  CDS (190634)..(191575): Predicted Fe-S oxidoreductases
  CDS (192560)..(193048): Uncharacterized ACR
  CDS (193094)..(193648): Xanthosine triphosphate pyrophosphatase
  CDS (198821)..(199372): Predicted transcriptional regulators
  CDS (201818)..(202111): Predicted RNA-binding proteins
  CDS (208100)..(208594): Uncharacterized ACR
  CDS (224483)..(225595): Ferredoxin 2
  CDS (226478)..(227281): Coenzyme F420-reducing hydrogenase
  CDS (230078)..(231361): 2-methylthioadenine synthetase
  CDS (233546)..(234766): Phosphate/sulphate permeases
  CDS (239714)..(241261): ABC-type transport system involved in multi-copper enzyme maturat ion
  CDS (244514)..(246382): Dipeptidyl aminopeptidases/acylaminoacyl-peptidases
  CDS (246557)..(249535): Micrococcal nuclease (thermonuclease) homologs
  CDS (254522)..(255223): RecA-superfamily ATPases implicated in signal transduction
  CDS (258263)..(258757): Signal peptidase I
  CDS (262874)..(263152): Acylphosphatases
  CDS (267719)..(268417): Transcription initiation factor IIE
  CDS (268442)..(269191): Integrase
  CDS (275324)..(275740): Uncharacterized ACR
  CDS (280559)..(280984): Ferredoxin 3
  CDS (282305)..(282724): Zn finger protein HypA/HybF (possibly regulating hydrogenase expr ession)
  CDS (284843)..(285061): Phosphotransferase system cellobiose-specific component IIC
  CDS (285776)..(286015): Hydrogenase maturation factor
  CDS (288833)..(291220): Hydrogenase maturation factor
  CDS (291713)..(291817): Predicted nucleic acid-binding protein
  CDS (294854)..(296053): Selenocysteine lyase
  CDS (309455)..(309820): Uncharacterized ACR
  CDS (313310)..(314239): Ketopantoate reductase
  CDS (319235)..(319909): Predicted transcriptional regulator containing the HTH domain
  misc_feature (321437)..(321437): n is a or c or g or t.
  CDS (330380)..(330508)
  CDS (333278)..(333934): Uncharacterized ACR
  CDS (335885)..(336583): Uncharacterized ACR
  CDS (337835)..(338962): Outer membrane receptor proteins
  CDS (343787)..(345133): RecA-superfamily ATPases implicated in signal transduction
  CDS (349526)..(349876): Uncharacterized ACR
  CDS (354332)..(355123): SAM-dependent methyltransferases COG0500 SmtA
  CDS (356258)..(356380)
  CDS (356396)..(357046): Predicted ICC-like phosphoesterases
  CDS (357098)..(357433): Predicted transcriptional regulators
  CDS (377891)..(378523): Kef-type K+ transport systems
  CDS (381245)..(382003): Predicted nuclease of the RecB family
  CDS (391652)..(393103): Predicted sugar kinase
  CDS (393113)..(393736): Phosphoribosylaminoimidazolesuccinocarboxamide (SAICAR) synthase
  CDS (400079)..(401446): Predicted ATPase of the AAA superfamily
  CDS (402689)..(403843): Tryptophanyl-tRNA synthetase
  CDS (416282)..(416665): ABC-type dipeptide/oligopeptide/nickel transport systems
  CDS (417482)..(419437): ABC-type transport systems
  CDS (420878)..(422332): Uncharacterized ArCR
  CDS (422873)..(423193): Thiamine pyrophosphate-dependent dehydrogenases
  CDS (423359)..(426793): Inteins
  CDS (428345)..(428773): Predicted membrane protein
  CDS (431168)..(432121): MoxR-like ATPases
  CDS (447821)..(448441): Predicted membrane protein
  CDS (448562)..(449626): Galactokinase
  CDS (455009)..(455125): Sulfate permease and related transporters (MFS superfamily)
  CDS (462554)..(463459): Predicted Co/Zn/Cd cation transporters
  CDS (467444)..(468073): Dolichol kinase
  CDS (471563)..(471622)
  CDS (477755)..(479176): ABC-type dipeptide/oligopeptide/nickel transport systems
  CDS (480158)..(481165): ABC-type dipeptide/oligopeptide/nickel transport system
  CDS (485114)..(485290): Uncharacterized ArCR
  CDS (492320)..(492913): Short-chain dehydrogenases of various substrate specificities
  CDS (497006)..(497476): Endoglucanase
  CDS (515630)..(515737)
  CDS (515741)..(516766): Predicted transcriptional regulators
  CDS (516815)..(518161): Glycogen synthase
  CDS (518234)..(519679): Uncharacterized ACR related to pyruvate formate-lyase activating enzyme
  CDS (526781)..(527986): ABC-type dipeptide/oligopeptide/nickel transport systems
  misc_feature (527833)..(527833): n is a or c or g or t.
  misc_feature (527901)..(527901): n is a or c or g or t.
  misc_feature (527978)..(527978): n is a or c or g or t.
  CDS (529028)..(530041): ABC-type dipeptide/oligopeptide/nickel transport systems
  CDS (537161)..(537403): Uncharacterized ACR
  CDS (543410)..(543946): Uncharacterized ACR
  CDS (545687)..(547477): GDP-D-mannose dehydratase
  CDS (569453)..(569554)
  CDS (570809)..(570868)
  CDS (585497)..(585673): GTPases - Sulfate adenylate transferase subunit 1
  CDS (591476)..(592147): 6-pyruvoyl-tetrahydropterin synthase
  CDS (592814)..(593821): Signal peptidase I
  CDS (594785)..(595747): Aconitase A
  CDS (595805)..(596341): Inorganic pyrophosphatase
  CDS (596378)..(596950): DNA-directed RNA polymerase subunit E'
  CDS (597983)..(598156): Ribosomal protein S27AE
  CDS (609494)..(610348): 2-polyprenylphenol hydroxylase and related flavodoxin oxidoreduct ases~ COG0543 UbiB
  CDS (610349)..(611794): NADPH-dependent glutamate synthase beta chain and related oxidore ductases COG0493 GltD
  CDS (614450)..(614647): Protein-L-isoaspartate carboxylmethyltransferase
  CDS (617441)..(617566)
  CDS (617588)..(618769): Nicotinic acid phosphoribosyltransferase
  CDS (620702)..(621487): Predicted rRNA or tRNA methylase
  CDS (622886)..(625123): Ribonuclease HI
  CDS (626270)..(626884): Exoribonucleases
  CDS (628007)..(628519): ABC-type polar amino acid transport system
  CDS (631883)..(633598): Aspartyl aminopeptidase
  CDS (634625)..(634720)
  CDS (635807)..(636457): Integral membrane proteins of the MarC family
  CDS (636812)..(637033)
  CDS (644411)..(644857): Predicted nucleic acid-binding protein
  CDS (647402)..(647821): Predicted pyrophosphatase
  CDS (648602)..(649384): Proteasome protease subunit
  CDS (651602)..(652420): RNase PH-related exoribonuclease
  CDS (653270)..(653983): C4-type Zn finger
  CDS (665249)..(665761): Predicted phosphoesterase
  CDS (667298)..(668329): RNA phosphate cyclase
  CDS (668921)..(670723): NADH:ubiquinone oxidoreductase
  CDS (700328)..(701374): ABC-type transport system involved in multi-copper enzyme maturat ion
  CDS (704024)..(704809): Uncharacterized ACR
  CDS (706691)..(708097): Predicted ATPase of the AAA superfamily
  CDS (709844)..(710908): Alcohol dehydrogenase IV
  CDS (736109)..(736765): Ribosomal protein L16/L10E
  CDS (741941)..(742708): Ribosomal protein L4
  CDS (742715)..(742975): Ribosomal protein L23
  CDS (743705)..(744115): Ribosomal protein S19
  CDS (744593)..(745231): Ribosomal protein S3
  CDS (745718)..(745984): RNAse P protein subunit P29/POP4
  CDS (747131)..(747862): Ribosomal protein S4E
  CDS (749585)..(749965): Ribosomal protein L32E
  CDS (751754)..(752221): Ribosomal protein L30/L7E
  CDS (752711)..(754168): Preprotein translocase subunit SecY
  CDS (755684)..(756265): Cytidylate kinase 2
  CDS (756266)..(756517): Ribosomal protein L14E
  CDS (759707)..(760294): 16S RNA G1207 methylase RsmC
  CDS (760301)..(760858): Ribosomal protein S13
  CDS (761408)..(761830): Ribosomal protein S11
  CDS (761852)..(762640): DNA-directed RNA polymerase alpha subunit/40 kD subunit
  CDS (762785)..(763156): Ribosomal protein L18E
  CDS (763163)..(763591): Ribosomal protein L13
  CDS (764042)..(764239): DNA-directed RNA polymerase
  CDS (765590)..(766195): Ribosomal protein S2
  CDS (775154)..(775966): Purine nucleoside phosphorylase
  CDS (781415)..(782302): Predicted dioxygenase
  CDS (782339)..(782713): Predicted nucleotidyltransferases
  CDS (784139)..(784927): Predicted archaeal kinases
  CDS (787754)..(789088): Predicted hydrolase of the metallo-beta-lactamase superfamily
  CDS (789158)..(790189): Geranylgeranyl pyrophosphate synthase
  CDS (790934)..(792262): Acetylornithine deacetylase/Succinyl-diaminopimelate desuccinylas e and related deacylases
  CDS (795518)..(795982): Uncharacterized BCR
  CDS (805127)..(806323): Permease
  CDS (806981)..(807574): Uncharacterized ACR
  CDS (809843)..(810742): ABC-type branched-chain amino acid transport systems
  CDS (814097)..(815227): Cystathionine beta-lyases/cystathionine gamma-synthases
  CDS (816275)..(817204): Methionine synthase II (cobalamin-independent)
  CDS (818216)..(819316): Aspartokinases
  CDS (820241)..(821248): Aspartate-semialdehyde dehydrogenase
  CDS (832532)..(832999): Glutamate dehydrogenase/leucine dehydrogenase
  CDS (838190)..(838879): Ribose 5-phosphate isomerase
  CDS (844613)..(845071): Transcription antiterminator
  CDS (845600)..(845686)
  CDS (845717)..(846367): Ribosomal protein L1
  CDS (847457)..(847786): Ribosomal protein L12E/L44/L45/RPP1/RPP2
  CDS (849671)..(850945): Fe-S oxidoreductases family 2
  CDS (853094)..(854815): Glutamyl- and glutaminyl-tRNA synthetases
  CDS (860912)..(861622): Phosphomannomutase
  CDS (868688)..(870181): Glycerol kinase
  CDS (875009)..(876277): Uncharacterized NAD(FAD)-dependent dehydrogenases
  CDS (883754)..(885118): Glycine cleavage system protein P (pyridoxal-binding)
  CDS (891551)..(892051): Excinuclease ATPase subunit
  CDS (892439)..(892957): Guanylate kinase
  CDS (897437)..(898069): ABC-type sugar/spermidine/putrescine/iron/thiamine transport syst ems
  CDS (903626)..(904546): UDP-N-acetylglucosamine:LPS N-acetylglucosamine transferase
  CDS (914990)..(915094)
  CDS (915104)..(915355): Transcriptional regulators
  CDS (925772)..(927688): 3'-phosphoadenosine 5'-phosphosulfate sulfotransferase (PAPS redu ctase)/FAD synthetase and related enzymes COG0175 CysH
  CDS (929072)..(929692): Uncharacterized archaeal Zn-finger family
  CDS (931085)..(931462): Ribosomal protein HS6-type (S12/L30/L7a)
  CDS (931751)..(931960): Ribosomal protein L24E
  CDS (934844)..(938287): Translation initiation factor 2 (GTPase)
  CDS (957434)..(958846): Na+-driven multidrug efflux pump
  misc_feature (960838)..(960839): n is a or c or g or t.
  misc_feature (960860)..(960861): n is a or c or g or t.
  misc_feature (960872)..(960873): n is a or c or g or t.
  misc_feature (960879)..(960879): n is a or c or g or t.
  misc_feature (960890)..(960890): n is a or c or g or t.
  CDS (984917)..(985705): Putative silver efflux pump
  CDS (997853)..(998260): Zn-dependent hydrolases
  CDS (998774)..(999469): Sensory transduction histidine kinases
  CDS (1000565)..(1000810)
  CDS (1010189)..(1011307): UDP-N-acetylglucosamine 2-epimerase
  CDS (1014254)..(1014787): Multisubunit Na+/H+ antiporter
  CDS (1015424)..(1015708): Predicted subunit of the Multisubunit Na+/H+ antiporter
  CDS (1016756)..(1018243): Formate hydrogenlyase subunit 3/Multisubunit Na+/H+ antiporter
  CDS (1020986)..(1021585): NADH:ubiquinone oxidoreductase 20 kD subunit and related Fe-S oxi doreductases
  CDS (1022165)..(1023358): NADH:ubiquinone oxidoreductase 49 kD subunit 7
  CDS (1027610)..(1028071): Transcriptional regulators
  CDS (1029515)..(1029979): TPR-repeat-containing proteins
  CDS (1031543)..(1032016): Signal recognition particle GTPase
  CDS (1040768)..(1041169): Ribosomal protein S8E
  CDS (1044566)..(1045702): NADH:ubiquinone oxidoreductase subunit 5 (chain L)/Multisubunit N a+/H+ antiporter
  CDS (1057034)..(1057564): Carbonic anhydrases/acetyltransferases
  CDS (1057571)..(1058365): Undecaprenyl pyrophosphate synthase
  CDS (1062392)..(1063021): Uncharacterized ArCR
  CDS (1063292)..(1063696): Isocitrate/isopropylmalate dehydrogenase
  CDS (1066067)..(1067059): Predicted permease
  CDS (1079186)..(1081399): Glutamate-1-semialdehyde aminotransferase
  CDS (1099484)..(1099801): Ferredoxin 3
  CDS (1099805)..(1100995): Pyruvate:ferredoxin oxidoreductase and related 2-oxoacid:ferredox in oxidoreductases
  CDS (1101812)..(1102135): Predicted nucleotidyltransferases
  CDS (1102466)..(1103029): Pyruvate:ferredoxin oxidoreductase and related 2-oxoacid:ferredox in oxidoreductases
  CDS (1105007)..(1105576): Pyruvate:ferredoxin oxidoreductase and related 2-oxoacid:ferredox in oxidoreductases
  CDS (1107563)..(1107616)
  CDS (1107953)..(1108219): Tetrahydrodipicolinate N-succinyltransferase
  CDS (1111613)..(1112296): Uncharacterized ACR
  CDS (1113101)..(1114555): RNA-binding proteins (RRM domain)
  CDS (1116038)..(1117426): Phosphomannomutase
  CDS (1136348)..(1139719): DNA-directed RNA polymerase beta subunit/140 kD subunit (split ge ne in Mjan
  CDS (1141214)..(1142446): DNA-directed RNA polymerase beta' subunit/160 kD subunit (split g ene in archaea and Syn)
  CDS (1145600)..(1145845): Regulators of stationary/sporulation gene expression
  CDS (1150556)..(1152391): Aldehyde:ferredoxin oxidoreductase
  CDS (1152434)..(1152712): Molybdopterin converting factor
  CDS (1158365)..(1158898): Histone acetyltransferase HPA2 and related acetyltransferases COG 0454 WecD
  CDS (1159673)..(1159954): Zn-dependent oligopeptidases
  CDS (1160069)..(1161121): ATPase involved in DNA repair
  CDS (1161800)..(1162129): Uncharacterized membrane-associated protein/domain
  CDS (1176485)..(1177357): 2-Phosphoglycerate kinase
  CDS (1180118)..(1181008): Predicted type IV restriction endonuclease
  CDS (1185263)..(1185466): Uncharacterized ArCR
  CDS (1185920)..(1186678): Predicted phosphate-binding enzymes
  CDS (1220948)..(1221082): Uncharacterized ACR
  CDS (1237796)..(1238032): Small nuclear ribonucleoprotein (snRNP) homolog
  CDS (1238342)..(1239709): Na+-driven multidrug efflux pump
  CDS (1239740)..(1240003): Nuclease subunit of the excinuclease complex
  CDS (1244861)..(1245058)
  CDS (1249493)..(1249729): Protein
  misc_feature (1250239)..(1250239): n is a or c or g or t.
  CDS (1252118)..(1253368): Nucleoside-diphosphate-sugar pyrophosphorylases involved in lipop olysaccharide biosynthesis/translation initiation factor eIF2B su bunits COG1208 GCD1
  CDS (1258907)..(1259653): ATPases involved in chromosome partitioning
  CDS (1265864)..(1266568): Predicted nucleotidyltransferase
  CDS (1268198)..(1268968): Acyl-CoA synthetase (NDP forming)
  CDS (1279802)..(1280632): Acetyltransferases
  CDS (1299356)..(1299526): Deoxyinosine 3'endonuclease (endonuclease V)
  CDS (1300448)..(1301629): Predicted pseudouridylate synthase
  CDS (1302092)..(1302448): Uncharacterized ArCR
  misc_feature (1302432)..(1302434): n is a or c or g or t.
  misc_feature (1302471)..(1302471): n is a or c or g or t.
  misc_feature (1302488)..(1302488): n is a or c or g or t.
  CDS (1303274)..(1303996): Dimethyladenosine transferase (rRNA methylation)
  CDS (1340345)..(1341040): Cobalamin-5-phosphate synthase
  CDS (1341617)..(1342555): Parvulin-like peptidyl-prolyl isomerase
  CDS (1354439)..(1355029): Nitroreductase
  CDS (1363805)..(1364959): Uncharacterized NAD(FAD)-dependent dehydrogenases
  CDS (1368785)..(1369588): Beta-xylosidase
  CDS (1371242)..(1372954): Pyruvate:ferredoxin oxidoreductase and related 2-oxoacid:ferredox in oxidoreductases
  CDS (1382723)..(1382923): 3-dehydroquinate synthetase
  CDS (1387979)..(1388341): Translation initiation factor IF-1
  CDS (1389104)..(1389871): Predicted RNA-binding protein (contains KH domains)
  CDS (1391570)..(1392727): DNA topoisomerase VI
  CDS (1393973)..(1394392): Uncharacterized ArCR
  CDS (1394450)..(1396561): GTPase subunit of restriction endonuclease
  CDS (1402505)..(1403125): Uncharacterized membrane protein (homolog of Drosophila rhomboid)
  CDS (1406579)..(1406932): Uncharacterized ACR
  CDS (1421654)..(1422160): Predicted transcriptional regulators
  CDS (1422209)..(1422760): Uncharacterized ACR
  CDS (1429223)..(1429528): Predicted acetyltransferase
  CDS (1429553)..(1430605): Glycosyltransferases
  CDS (1442882)..(1444780): Dipeptidyl aminopeptidases/acylaminoacyl-peptidases
  CDS (1453307)..(1453444): Uncharacterized Fe-S protein
  CDS (1454048)..(1454563): DNA polymerase III
  CDS (1459691)..(1460317): SAM-dependent methyltransferases COG0500 SmtA
  CDS (1462442)..(1463176): ABC-type multidrug transport system
  CDS (1464173)..(1464643): General secretory pathway protein D
  CDS (1465025)..(1465564): Aldo/keto reductases
  CDS (1471373)..(1471948)
  CDS (1482629)..(1483522): MinD superfamily P-loop ATPase containing an inserted ferredoxin domain
  CDS (1485404)..(1486735): Predicted Zn-dependent proteases and their inactivated homologs
  CDS (1489979)..(1490683): ABC-type Na+ efflux pump
  CDS (1497077)..(1498300): Amino acid permeases
  CDS (1505933)..(1506805): Zn-dependent protease with chaperone function
  CDS (1508210)..(1508308)
  CDS (1508825)..(1508917)
  CDS (1511792)..(1512838): NADPH-dependent glutamate synthase beta chain and related oxidore ductases COG0493 GltD
  CDS (1512875)..(1513888): Deoxyhypusine synthase
  CDS (1513967)..(1514725): Uncharacterized ACR
  CDS (1530056)..(1530514): Superfamily I DNA and RNA helicases and helicase subunits
  CDS (1532468)..(1533595): Signal recognition particle GTPase
  CDS (1564550)..(1566541): Predicted membrane protein
  CDS (1568837)..(1569220): Ammonia permeases
  CDS (1569569)..(1569799): tRNA-processing ribonuclease BN
  CDS (1569803)..(1570606)
  CDS (1576901)..(1577455): Phosphotransferase system
  CDS (1579958)..(1580575): Inteins
  CDS (1586411)..(1586593): DNA-directed RNA polymerase beta' subunit/160 kD subunit (split g ene in archaea and Syn)
  CDS (1587899)..(1588129): Pyruvate dehydrogenase
  CDS (1589429)..(1589782): Transaldolase
  CDS (1603370)..(1603936): Anthranilate phosphoribosyltransferase
  CDS (1608251)..(1608535): Archaeal DNA-binding protein
  CDS (1608623)..(1609180): Predicted transcriptional regulators
  CDS (1616741)..(1618360): Predicted carbamoyl transferase
  CDS (1620572)..(1621750): PLP-dependent aminotransferases
  CDS (1622531)..(1622746)
  CDS (1624406)..(1624918): Molybdopterin biosynthesis enzymes
  CDS (1625570)..(1626760): Molybdopterin biosynthesis enzyme
  CDS (1629698)..(1630240): Acetyltransferases
  CDS (1649720)..(1651156): Pyruvate kinase
  CDS (1654757)..(1655932): Mg2+ and Co2+ transporters
  misc_feature (1674836)..(1674836): n is a or c or g or t.
  CDS (1682669)..(1683418): Arginase/agmatinase/formimionoglutamate hydrolase
  CDS (1690907)..(1691200): Predicted ATP-dependent serine protease
  CDS (1698050)..(1699249): Uncharacterized proteins of WD40-like repeat family
  CDS (1704338)..(1704850): RecB family exonuclease
  CDS (1707065)..(1708267): Uncharacterized ACR
  CDS (1721138)..(1722088): Hydrogenase maturation factor
  CDS (1722227)..(1722679): Predicted metal-dependent membrane protease
  CDS (1731341)..(1732000): Phosphoribosylaminoimidazolesuccinocarboxamide (SAICAR) synthase
  CDS (1738961)..(1740811): Serine proteases of the peptidase family S9A
  CDS (1772405)..(1773133): Predicted transcriptional regulators
  CDS (1773320)..(1773760): Catalase
  CDS (1776842)..(1777270): Phosphate uptake regulator
  CDS (1778741)..(1779886): Thiamine biosynthesis ATP pyrophosphatase
  CDS (1784252)..(1784680): Uncharacterized ACR
  CDS (1784690)..(1785628): tRNA and rRNA cytosine-C5-methylases
  CDS (1786127)..(1787575): Uncharacterized ACR
  CDS (1791647)..(1792174): Molybdenum cofactor biosynthesis enzyme
  CDS (1798349)..(1799242): 3-Methyladenine DNA glycosylase
  CDS (1799885)..(1800205)
  CDS (1800941)..(1801228): Uncharacterized ACR
  CDS (1801733)..(1802332): Predicted nucleotide kinase (related to CMP and AMP kinases)
  CDS (1826894)..(1827202): Ribosomal protein S10
  CDS (1830926)..(1832254): Uncharacterized NAD(FAD)-dependent dehydrogenases
  CDS (1853033)..(1854175): 3-isopropylmalate dehydratase large subunit
  CDS (1856795)..(1857787): Acetylglutamate semialdehyde dehydrogenase
  CDS (1857797)..(1858552): Acetylglutamate kinase
  CDS (1859633)..(1860031): Acetylornithine deacetylase/Succinyl-diaminopimelate desuccinylas e and related deacylases
  CDS (1861637)..(1862008): AraC-type DNA-binding domain-containing proteins
  CDS (1862534)..(1863577): Transketolase
  CDS (1866119)..(1866499): Shikimate 5-dehydrogenase
  CDS (1867142)..(1867702): Archaeal shikimate kinase COG1685 -
  CDS (1889624)..(1890883)
  CDS (1895345)..(1895677): Histone acetyltransferase HPA2 and related acetyltransferases COG 0454 WecD
  CDS (1902374)..(1903390): Pyridoxine biosynthesis enzyme
  CDS (1908347)..(1908835): Predicted nucleic acid-binding protein
  CDS (1910339)..(1911058): Phosphoribosylaminoimidazolesuccinocarboxamide (SAICAR) synthase
  CDS (1912340)..(1913638): Formate-dependent phosphoribosylglycinamide formyltransferase (GA R transformylase)
  CDS (1915544)..(1916851): Phosphoribosylamine-glycine ligase
  CDS (1918250)..(1918921): Phosphoribosylformylglycinamidine (FGAM) synthase
  CDS (1921847)..(1923988): Phosphoribosylformylglycinamidine (FGAM) synthase
  CDS (1937450)..(1938502): 3-hydroxy-3-methylglutaryl CoA synthase
  CDS (1940105)..(1942171): Superfamily I DNA and RNA helicases and helicase subunits
  CDS (1942775)..(1943371): Uncharacterized ACR
  CDS (1944143)..(1944454): Uncharacterized ACR
  CDS (1954544)..(1954834): Putative hemagglutinin/hemolysin
  CDS (1956329)..(1958230): ABC-type thiamine transport system
  CDS (1959365)..(1960747): Permeases
  CDS (1969439)..(1970317): Spermidine synthase
  CDS (1971884)..(1972702): ATPases involved in DNA repair
  CDS (1978343)..(1980286): Pyruvate:ferredoxin oxidoreductase and related 2-oxoacid:ferredox in oxidoreductases
  CDS (2027579)..(2029480): Aldehyde:ferredoxin oxidoreductase
  CDS (2031794)..(2032114): Na+/alanine symporter
  CDS (2035586)..(2036776): DNA polymerase III
  CDS (2037317)..(2037895): Phosphatidylglycerophosphate synthase
  CDS (2040239)..(2041441): Signal peptidase
  CDS (2063567)..(2063965): RNAse P protein subunit RPR2
  CDS (2069195)..(2070088): Archaea-specific RecJ-like exonuclease
  CDS (2070098)..(2070592): Na+-transporting NADH:ubiquinone oxidoreductase alpha subunit
  CDS (2075537)..(2075986): Predicted nucleic acid-binding protein
  CDS (2081987)..(2082226): Predicted ATPase or kinase

SEQ ID NO: 1470 - protein, 67 aa, Thermococcus kodakaraensis KOD1
  misc_feature (321437)..(321437): n is a or c or g or t.
  misc_feature (527833)..(527833): n is a or c or g or t.
  misc_feature (527901)..(527901): n is a or c or g or t.
  misc_feature (527978)..(527978): n is a or c or g or t.
  misc_feature (960838)..(960839): n is a or c or g or t.
  misc_feature (960860)..(960861): n is a or c or g or t.
  misc_feature (960872)..(960873): n is a or c or g or t.
  misc_feature (960879)..(960879): n is a or c or g or t.
  misc_feature (960890)..(960890): n is a or c or g or t.
  misc_feature (1250239)..(1250239): n is a or c or g or t.
  misc_feature (1302432)..(1302434): n is a or c or g or t.
  misc_feature (1302471)..(1302471): n is a or c or g or t.
  misc_feature (1302488)..(1302488): n is a or c or g or t.
  misc_feature (1674836)..(1674836): n is a or c or g or t.
MAELPIAPVDRLIRKAGAARVSEEAAKVLAEHLEEKALEIAKKAVALAQHAGRKTVKAEDIKLAIKS

SEQ ID NO: 1471 - protein, 179 aa, Thermococcus kodakaraensis KOD1
  misc_feature (321437)..(321437): n is a or c or g or t.
  misc_feature (527833)..(527833): n is a or c or g or t.
  misc_feature (527901)..(527901): n is a or c or g or t.
  misc_feature (527978)..(527978): n is a or c or g or t.
  misc_feature (960838)..(960839): n is a or c or g or t.
  misc_feature (960860)..(960861): n is a or c or g or t.
  misc_feature (960872)..(960873): n is a or c or g or t.
  misc_feature (960879)..(960879): n is a or c or g or t.
  misc_feature (960890)..(960890): n is a or c or g or t.
  misc_feature (1250239)..(1250239): n is a or c or g or t.
  misc_feature (1302432)..(1302434): n is a or c or g or t.
  misc_feature (1302471)..(1302471): n is a or c or g or t.
  misc_feature (1302488)..(1302488): n is a or c or g or t.
  misc_feature (1674836)..(1674836): n is a or c or g or t.
MMMRRDFPEVVSMDRYVLLVKAPRGADLSSFRDEAKALAEKYGFEAETHRCIGLTVDAVIVYNNGIVLIKRKNEPFKDHYALPGGFVEYGETVEEALLREVKEETGLDVKPVKLVGVYSRPDRDPRGHTVTVAFLCIGEGELKAGDDAKEVFVFPIEEALNLPLAFDHGEILRDALSLR

SEQ ID NO: 1472 - protein, 301 aa, Thermococcus kodakaraensis KOD1
  misc_feature (321437)..(321437): n is a or c or g or t.
  misc_feature (527833)..(527833): n is a or c or g or t.
  misc_feature (527901)..(527901): n is a or c or g or t.
  misc_feature (527978)..(527978): n is a or c or g or t.
  misc_feature (960838)..(960839): n is a or c or g or t.
  misc_feature (960860)..(960861): n is a or c or g or t.
  misc_feature (960872)..(960873): n is a or c or g or t.
  misc_feature (960879)..(960879): n is a or c or g or t.
  misc_feature (960890)..(960890): n is a or c or g or t.
  misc_feature (1250239)..(1250239): n is a or c or g or t.
  misc_feature (1302432)..(1302434): n is a or c or g or t.
  misc_feature (1302471)..(1302471): n is a or c or g or t.
  misc_feature (1302488)..(1302488): n is a or c or g or t.
  misc_feature (1674836)..(1674836): n is a or c or g or t.
VSVMEAAAPLIALTLSAVLTPYIAGLMKKARIVGRDIHKLTKPEVPEMGGLALLISIGAVSSLIKPEIGLVFLLFGIVGIIDDLAALKQSHKVALSLIVASPVMFFDIPRYVDVFGFPLNLGVIYPIVALLYVVGSANLVNMLAGFNGLEVGTSAIALAFLGVLTDGTARELALIGTAAALGFLWWNRYPARVFPGDTGTLSLGALIGLVAVVGKVEAYGAVLLIPHFLDFVIKAVGVRFGVRKHGRTEVLPDGTLKAPPYPSFLGMIMRKVRVNEPKLVAIVWAIEFILGLLALALSQLL

SEQ ID NO: 1473 - protein, 228 aa, Thermococcus kodakaraensis KOD1
  misc_feature (321437)..(321437): n is a or c or g or t.
  misc_feature (527833)..(527833): n is a or c or g or t.
  misc_feature (527901)..(527901): n is a or c or g or t.
  misc_feature (527978)..(527978): n is a or c or g or t.
  misc_feature (960838)..(960839): n is a or c or g or t.
  misc_feature (960860)..(960861): n is a or c or g or t.
  misc_feature (960872)..(960873): n is a or c or g or t.
  misc_feature (960879)..(960879): n is a or c or g or t.
  misc_feature (960890)..(960890): n is a or c or g or t.
  misc_feature (1250239)..(1250239): n is a or c or g or t.
  misc_feature (1302432)..(1302434): n is a or c or g or t.
  misc_feature (1302471)..(1302471): n is a or c or g or t.
  misc_feature (1302488)..(1302488): n is a or c or g or t.
  misc_feature (1674836)..(1674836): n is a or c or g or t.
MGFVEYYSAFKAYSDINSEEYRRRIENLEPLLMKFMKTRGRVLDLACGVGGFSFLLEDLGFEVVGLDNSRFMLEKAREFAKEKESRVEFIEGDARELPFENDSFDYVLFIDSLVHFEPQDLAKVFKETARVLKPGGKFILQFTDLRALLPVLMNGQVVGAEYWVNKVLPDQEEKTVVIEFQSEKDSFRVKFNVWGKMAVELLAKLYFRKEGEEKLNEHSYFQVYGPKK

SEQ ID NO: 1474 - protein, 293 aa, Thermococcus kodakaraensis KOD1
  misc_feature (321437)..(321437): n is a or c or g or t.
  misc_feature (527833)..(527833): n is a or c or g or t.
  misc_feature (527901)..(527901): n is a or c or g or t.
  misc_feature (527978)..(527978): n is a or c or g or t.
  misc_feature (960838)..(960839): n is a or c or g or t.
  misc_feature (960860)..(960861): n is a or c or g or t.
  misc_feature (960872)..(960873): n is a or c or g or t.
  misc_feature (960879)..(960879): n is a or c or g or t.
  misc_feature (960890)..(960890): n is a or c or g or t.
  misc_feature (1250239)..(1250239): n is a or c or g or t.
  misc_feature (1302432)..(1302434): n is a or c or g or t.
  misc_feature (1302471)..(1302471): n is a or c or g or t.
  misc_feature (1302488)..(1302488): n is a or c or g or t.
  misc_feature (1674836)..(1674836): n is a or c or g or t.
VIEVEVELLRSQVFFPASLEIQEELLKAGFKVPYDKESGRKTPVPVVVSSREHRKIRESRLLKARDYEGDGKFALLPEERAVIELDVTEKGFLVLKPKPMEYHLEERGFLSVPPRLWGTWASFSLPFSAYEDIVEEFGAFKDEEAMGIQLASKGSGSRIEVYAYKGRSRKDLGIPVFGYALGLHGLTLADEYLREKAEENGVPEERLRYLKLGLKKRKETKAGLKVGVIWENGKPTEITLKLTTTEPRIRIQGLYGELIGKSRGELTRTREWYIVVHAGDFVNALEAVHKAFG

SEQ ID NO: 1475 - protein, 350 aa, Thermococcus kodakaraensis KOD1
  misc_feature (321437)..(321437): n is a or c or g or t.
  misc_feature (527833)..(527833): n is a or c or g or t.
  misc_feature (527901)..(527901): n is a or c or g or t.
  misc_feature (527978)..(527978): n is a or c or g or t.
  misc_feature (960838)..(960839): n is a or c or g or t.
  misc_feature (960860)..(960861): n is a or c or g or t.
  misc_feature (960872)..(960873): n is a or c or g or t.
  misc_feature (960879)..(960879): n is a or c or g or t.
  misc_feature (960890)..(960890): n is a or c or g or t.
  misc_feature (1250239)..(1250239): n is a or c or g or t.
  misc_feature (1302432)..(1302434): n is a or c or g or t.
  misc_feature (1302471)..(1302471): n is a or c or g or t.
  misc_feature (1302488)..(1302488): n is a or c or g or t.
  misc_feature (1674836)..(1674836): n is a or c or g or t.
VSFPQQQRVGMPKMPAIKVPKREAEPLKRKLKKLNLYDGKRRPRSEGDFVLLPVIDDPRVYELGHEVLPVELPLRPERQIYKNLESVLAERLTSEELKYLRRYDVIGDIAVIQIPPELEHRAEDIVWGLRKVHPFIKVVAKKGFHEGAFRIRDYSIIWGEKRLTTVHKENGVEIKVDLSKAFFNPRMKGERYRLAQLVKDGERILIPFAGVLPYALVIARYKKVKITAVELNEDAYRLGLENIELNRKRLKGEIELIQGDAFKVLPELPTFERVISPTPRGVDALALTLSKAQKWLHYYDFVHEEKIGEFGERILEECRKQGKDCRVRIKKVSDFKPHVFKVCADVEILG

SEQ ID NO: 1476 - protein, 286 aa, Thermococcus kodakaraensis KOD1
  misc_feature (321437)..(321437): n is a or c or g or t.
  misc_feature (527833)..(527833): n is a or c or g or t.
  misc_feature (527901)..(527901): n is a or c or g or t.
  misc_feature (527978)..(527978): n is a or c or g or t.
  misc_feature (960838)..(960839): n is a or c or g or t.
  misc_feature (960860)..(960861): n is a or c or g or t.
  misc_feature (960872)..(960873): n is a or c or g or t.
  misc_feature (960879)..(960879): n is a or c or g or t.
  misc_feature (960890)..(960890): n is a or c or g or t.
  misc_feature (1250239)..(1250239): n is a or c or g or t.
  misc_feature (1302432)..(1302434): n is a or c or g or t.
  misc_feature (1302471)..(1302471): n is a or c or g or t.
  misc_feature (1302488)..(1302488): n is a or c or g or t.
  misc_feature (1674836)..(1674836): n is a or c or g or t.
MHMRIIHRRIELSRLEGEGWKMLYGRRKTGKTFLVRNFLDYDEFFFVEREGMVRDLNEGSTMTYGEFMRLFPRLLKGGKVVVDEFHRLPDRFLDLLHAYSGTGELILITSTRWLAKRKLLGTGSPLLGIVQPIRIDPIDEREILAEMSREVRGKELIEASTYLREPILVPLYRSPLREFLAGYLSSSGLLIGELVGEAFTEEERELTEVYRAIMKGIADGKETSTELSSFLYSLSLISKDNTGVLQRYLGVLTDMGILRRTQVTGKRRKKFVYRHASPLFDTSLLP

SEQ ID NO: 1477 - protein, 475 aa, Thermococcus kodakaraensis KOD1
  misc_feature (321437)..(321437): n is a or c or g or t.
  misc_feature (527833)..(527833): n is a or c or g or t.
  misc_feature (527901)..(527901): n is a or c or g or t.
  misc_feature (527978)..(527978): n is a or c or g or t.
  misc_feature (960838)..(960839): n is a or c or g or t.
  misc_feature (960860)..(960861): n is a or c or g or t.
  misc_feature (960872)..(960873): n is a or c or g or t.
  misc_feature (960879)..(960879): n is a or c or g or t.
  misc_feature (960890)..(960890): n is a or c or g or t.
  misc_feature (1250239)..(1250239): n is a or c or g or t.
  misc_feature (1302432)..(1302434): n is a or c or g or t.
  misc_feature (1302471)..(1302471): n is a or c or g or t.
  misc_feature (1302488)..(1302488): n is a or c or g or t.
  misc_feature (1674836)..(1674836): n is a or c or g or t.
MSSSLWGLYFSTHGFSRILTSFTSSDMDFHLNLYEPPEFKAFAVSLGRCTQPTIVFSWNCTDLPTAKLLYFNDQEPSVILMGKLDWIREELQELKDKGLYVTIRKLESAQGPWVVVDGKKVLNMCSNNYLGLAAHPEIRYAAIRAILDYGVGAGAVRTIAGTMELHVELEEKLAKFKKREAAILFQSGYNANLGAISALLKKGEDGVFISEELNHASIIDGMRLSGAPKVIYKHIDMEDLKKRLEENKDKKKKIIVSDGVFSMDGDLAPLPEMAELAEQYDAILYIDDAHGEGVLGDSGRGIVDHFKLHDKVDFEMGTLSKAFGVIGGYVAGPEEAIEYLRQRARPFLFSSAPNPPDVAAAIAAVEILQRSDELVRKLWDNTNFLQKGLRDLGYDLGNTKHPITPVMLYDEKLAQEFSRRLYDEYNIFAQAIVYPTVPLGTARIRLEPSAAHSKEDLQYVIDAFEDLGKKTGFLK

SEQ ID NO: 1478 - protein, 460 aa, Thermococcus kodakaraensis KOD1
  misc_feature (321437)..(321437): n is a or c or g or t.
  misc_feature (527833)..(527833): n is a or c or g or t.
  misc_feature (527901)..(527901): n is a or c or g or t.
  misc_feature (527978)..(527978): n is a or c or g or t.
  misc_feature (960838)..(960839): n is a or c or g or t.
  misc_feature (960860)..(960861): n is a or c or g or t.
  misc_feature (960872)..(960873): n is a or c or g or t.
  misc_feature (960879)..(960879): n is a or c or g or t.
  misc_feature (960890)..(960890): n is a or c or g or t.
  misc_feature (1250239)..(1250239): n is a or c or g or t.
  misc_feature (1302432)..(1302434): n is a or c or g or t.
  misc_feature (1302471)..(1302471): n is a or c or g or t.
  misc_feature (1302488)..(1302488): n is a or c or g or t.
  misc_feature (1674836)..(1674836): n is a or c or g or t.
MKFAHIADVHLGFEQYRLPYRADEFAEAFRRAIEIAVEEKVDFILIAGDLFHSSRPSPETLKQAMEILSLPKEKGIPVFGIEGNHDRTQRRVSAYHLLEKLGLLYLIGLREEKVESEHQTSEKTERGWLVKGVFEKGNKSVEIHGMKYMSAAWLEKNPPKEIFRPEGDSILMLHQGVRELVEEMMGKLPESQRDYYELKLGDLPKGYLYYALGHIHRAFLTSYDIGKLVYPGSLQRWDFGDYEIRYRWDGNTFKPTAGNPKGFYIVEDWEPRFVELNVRPFIDVNIKADEETAKRELKRLSTKIPEEAFVRLDIRWERPYDVSKLTELIKARYVYVRTRFERKLTGRTPSGEVPKPEEYFIPVELKAINLTGEKAIESIEEVVELFLGEGWDEKLPKKTEEPERKEDATAKKEGGPEKEKRPKTQGKEQRETKERKDSEKKVVKRPSKGSNLLDWLGGGR

SEQ ID NO: 1479 - protein, 242 aa, Thermococcus kodakaraensis KOD1
  misc_feature (321437)..(321437): n is a or c or g or t.
  misc_feature (527833)..(527833): n is a or c or g or t.
  misc_feature (527901)..(527901): n is a or c or g or t.
  misc_feature (527978)..(527978): n is a or c or g or t.
  misc_feature (960838)..(960839): n is a or c or g or t.
  misc_feature (960860)..(960861): n is a or c or g or t.
  misc_feature (960872)..(960873): n is a or c or g or t.
  misc_feature (960879)..(960879): n is a or c or g or t.
  misc_feature (960890)..(960890): n is a or c or g or t.
  misc_feature (1250239)..(1250239): n is a or c or g or t.
  misc_feature (1302432)..(1302434): n is a or c or g or t.
  misc_feature (1302471)..(1302471): n is a or c or g or t.
  misc_feature (1302488)..(1302488): n is a or c or g or t.
  misc_feature (1674836)..(1674836): n is a or c or g or t.
MRLFARVSYSYGQREVLKDVEIEARRGELLAIIGPNGAGKSTLLKSLVGILKPIGKVELDGRDILTLKPAERAKLITYVPQSSFPEFAFTVEEFVEMGSYMTGGSVEDALRKVGLWERRRDRITALSGGEFQLALIARALAQGSRAVLLDEPTSHLDVNHALTVMELLRELKTERIIIAVLHDVNLALEYADRLVVMKDGEKFWEGKPGEITPDVLERVYGIRAKIVEVDSHRVFIPELAKV

SEQ ID NO: 1480 - protein, 202 aa, Thermococcus kodakaraensis KOD1
  misc_feature (321437)..(321437): n is a or c or g or t.
  misc_feature (527833)..(527833): n is a or c or g or t.
  misc_feature (527901)..(527901): n is a or c or g or t.
  misc_feature (527978)..(527978): n is a or c or g or t.
  misc_feature (960838)..(960839): n is a or c or g or t.
  misc_feature (960860)..(960861): n is a or c or g or t.
  misc_feature (960872)..(960873): n is a or c or g or t.
  misc_feature (960879)..(960879): n is a or c or g or t.
  misc_feature (960890)..(960890): n is a or c or g or t.
  misc_feature (1250239)..(1250239): n is a or c or g or t.
  misc_feature (1302432)..(1302434): n is a or c or g or t.
  misc_feature (1302471)..(1302471): n is a or c or g or t.
  misc_feature (1302488)..(1302488): n is a or c or g or t.
  misc_feature (1674836)..(1674836): n is a or c or g or t.
VRKVEKKTGTTTVGIRTKEGVVLAADTQASLDHMVETLNIRKILPITDRIAITTAGSVGDVQALARMLEAEARYYQFTWGRPMTAKAMAHLLSNILNENKWFPYMVQIIIGGYVEEPTLANLDPLGGLIFDDYTATGSGSPFAIAVLEDGFRKDMSLEEAKELAVRAVRTAGKRDVYTGDRKVQVVVISKDGMKEEFVEFKE

SEQ ID NO: 1481 - protein, 328 aa, Thermococcus kodakaraensis KOD1
  misc_feature (321437)..(321437): n is a or c or g or t.
  misc_feature (527833)..(527833): n is a or c or g or t.
  misc_feature (527901)..(527901): n is a or c or g or t.
  misc_feature (527978)..(527978): n is a or c or g or t.
  misc_feature (960838)..(960839): n is a or c or g or t.
  misc_feature (960860)..(960861): n is a or c or g or t.
  misc_feature (960872)..(960873): n is a or c or g or t.
  misc_feature (960879)..(960879): n is a or c or g or t.
  misc_feature (960890)..(960890): n is a or c or g or t.
  misc_feature (1250239)..(1250239): n is a or c or g or t.
  misc_feature (1302432)..(1302434): n is a or c or g or t.
  misc_feature (1302471)..(1302471): n is a or c or g or t.
  misc_feature (1302488)..(1302488): n is a or c or g or t.
  misc_feature (1674836)..(1674836): n is a or c or g or t.
MDLSLGEGDTPLVKSKLGKELGVKLYLKNETANPTWSFKDRGTFLAVSYAVKAGYKAIGTVSTGNMAASVAAYAARAGLKAKILVSESASEEKLKTVSVYGADVIRVRGDYGRLYFESLELGEKLGIYFINSDNPFRVEGYKGIAFEMAEELTPDYVLIPTSSGGLFRGIAKGFIELKESGLIEKLPTLIAVQAEGCSPICRAFNEGNERIKRFENPNTIAKAIANPYPPSGNAVLKLLRDLGWKCTTVSDEEILEAQRELAKEGLFVQPASATGIAVLKKLVESEKIDEGAKVVSILTGSGLKVLAHMPSGKIVNCPLEGLENCVSF

SEQ ID NO: 1482 - protein, 262 aa, Thermococcus kodakaraensis KOD1
  misc_feature (321437)..(321437): n is a or c or g or t.
  misc_feature (527833)..(527833): n is a or c or g or t.
  misc_feature (527901)..(527901): n is a or c or g or t.
  misc_feature (527978)..(527978): n is a or c or g or t.
  misc_feature (960838)..(960839): n is a or c or g or t.
  misc_feature (960860)..(960861): n is a or c or g or t.
  misc_feature (960872)..(960873): n is a or c or g or t.
  misc_feature (960879)..(960879): n is a or c or g or t.
  misc_feature (960890)..(960890): n is a or c or g or t.
  misc_feature (1250239)..(1250239): n is a or c or g or t.
  misc_feature (1302432)..(1302434): n is a or c or g or t.
  misc_feature (1302471)..(1302471): n is a or c or g or t.
  misc_feature (1302488)..(1302488): n is a or c or g or t.
  misc_feature (1674836)..(1674836): n is a or c or g or t.
MLFGIGLMPHGNPALSPEDKETEKLAGVLKDIGKAFSDADSYVLISPHNVRISDHLGVIMAQHLISWLGFEGVELPGEWETDRGLAEEVYNAWKGAEIPTVDLHFASRSGRYSRWPLTWGELIPLQFLEKKPLVLLTPARRLSRETLIKAGEVLGEVLEGSEKKIALIVSADHGHAHDENGPYGYRKESEEYDRLIMELINESRLEELPEIPDELIEKALPDSYWQMLIMLGAMHRVPVKLVESAYACPTYFGMAGALWVRE

SEQ ID NO: 1483 - protein, 250 aa, Thermococcus kodakaraensis KOD1
  misc_feature (321437)..(321437): n is a or c or g or t.
  misc_feature (527833)..(527833): n is a or c or g or t.
  misc_feature (527901)..(527901): n is a or c or g or t.
  misc_feature (527978)..(527978): n is a or c or g or t.
  misc_feature (960838)..(960839): n is a or c or g or t.
  misc_feature (960860)..(960861): n is a or c or g or t.
  misc_feature (960872)..(960873): n is a or c or g or t.
  misc_feature (960879)..(960879): n is a or c or g or t.
  misc_feature (960890)..(960890): n is a or c or g or t.
  misc_feature (1250239)..(1250239): n is a or c or g or t.
  misc_feature (1302432)..(1302434): n is a or c or g or t.
  misc_feature (1302471)..(1302471): n is a or c or g or t.
  misc_feature (1302488)..(1302488): n is a or c or g or t.
  misc_feature (1674836)..(1674836): n is a or c or g or t.
MYAAELKKVFEVQREISDIHPILKKVYPIVVVKGDELWIFEPDESKQTYNLVKTAKSKTPLPEGIRAAFPVEEYDYKMACVVSDDVFESLRGYVSIFHEFVHCYQFECCELELKKSLEVFLEEQAKGNYSWELNYPFPYEKGEFQRAYAEFLSALERGDAEGVKKSRRELREHLTKKEYEYMVWQEWKEGLARFIENRILRRLGLPENHYGLEKPWDRTLFYEGGARFIDFLTGGSPTDLKGLFKSMMEF

SEQ ID NO: 1484 - protein, 193 aa, Thermococcus kodakaraensis KOD1
  misc_feature (321437)..(321437): n is a or c or g or t.
  misc_feature (527833)..(527833): n is a or c or g or t.
  misc_feature (527901)..(527901): n is a or c or g or t.
  misc_feature (527978)..(527978): n is a or c or g or t.
  misc_feature (960838)..(960839): n is a or c or g or t.
  misc_feature (960860)..(960861): n is a or c or g or t.
  misc_feature (960872)..(960873): n is a or c or g or t.
  misc_feature (960879)..(960879): n is a or c or g or t.
  misc_feature (960890)..(960890): n is a or c or g or t.
  misc_feature (1250239)..(1250239): n is a or c or g or t.
  misc_feature (1302432)..(1302434): n is a or c or g or t.
  misc_feature (1302471)..(1302471): n is a or c or g or t.
  misc_feature (1302488)..(1302488): n is a or c or g or t.
  misc_feature (1674836)..(1674836): n is a or c or g or t.
MKLLIIAPCLLSPFYVYRGPKEKEYETARRLRELIGRLGGEWQVLAYPCPEYELVGWPRAPASREVYERLGMRERAKIIADFIGRVLTEEKPEKVVFVGVKGSPTCGVFYTSSSNPDKYPYRAMQEFFYLSKEERLKRSKELVREQNFELKLLPGILFEILMARFPEWVYIEFDKDDAEGSIKRLEKALFTTR

SEQ ID NO: 1485 - protein, 102 aa, Thermococcus kodakaraensis KOD1
  misc_feature (321437)..(321437): n is a or c or g or t.
  misc_feature (527833)..(527833): n is a or c or g or t.
  misc_feature (527901)..(527901): n is a or c or g or t.
  misc_feature (527978)..(527978): n is a or c or g or t.
  misc_feature (960838)..(960839): n is a or c or g or t.
  misc_feature (960860)..(960861): n is a or c or g or t.
  misc_feature (960872)..(960873): n is a or c or g or t.
  misc_feature (960879)..(960879): n is a or c or g or t.
  misc_feature (960890)..(960890): n is a or c or g or t.
  misc_feature (1250239)..(1250239): n is a or c or g or t.
  misc_feature (1302432)..(1302434): n is a or c or g or t.
  misc_feature (1302471)..(1302471): n is a or c or g or t.
  misc_feature (1302488)..(1302488): n is a or c or g or t.
  misc_feature (1674836)..(1674836): n is a or c or g or t.
MNPVKQLLWWLIAGSEGGLNRARIIAALLERPSNARQLAKRLGLNYTTVRYHLDILQKNGLVTSTENRYGRMYFLSQLLLDNYSEFEEIWGRVKTEIGEGEK

SEQ ID NO: 1486 - protein, 198 aa, Thermococcus kodakaraensis KOD1
  misc_feature (321437)..(321437): n is a or c or g or t.
  misc_feature (527833)..(527833): n is a or c or g or t.
  misc_feature (527901)..(527901): n is a or c or g or t.
  misc_feature (527978)..(527978): n is a or c or g or t.
  misc_feature (960838)..(960839): n is a or c or g or t.
  misc_feature (960860)..(960861): n is a or c or g or t.
  misc_feature (960872)..(960873): n is a or c or g or t.
  misc_feature (960879)..(960879): n is a or c or g or t.
  misc_feature (960890)..(960890): n is a or c or g or t.
  misc_feature (1250239)..(1250239): n is a or c or g or t.
  misc_feature (1302432)..(1302434): n is a or c or g or t.
  misc_feature (1302471)..(1302471): n is a or c or g or t.
  misc_feature (1302488)..(1302488): n is a or c or g or t.
  misc_feature (1674836)..(1674836): n is a or c or g or t.
MKRALATGVLLLLFSFFAYNAYTYHELSTAEGAYKLAGIPKGEGLIAVYHEDTLWQFATYNEETNVLKLYTVSQSSQFWLKKKKVESARAFVNYSPVILDLGALKDYKSHEKALLFKTLGWKYDDEINGSYWWNLSEVIKPNETFYQIYALGTSKAIWIRSKEVCEKRSLFAHDYLCYGSIGMNGVLVFPSYKDTKLL

SEQ ID NO: 1487 - protein, 173 aa, Thermococcus kodakaraensis KOD1
  misc_feature (321437)..(321437): n is a or c or g or t.
  misc_feature (527833)..(527833): n is a or c or g or t.
  misc_feature (527901)..(527901): n is a or c or g or t.
  misc_feature (527978)..(527978): n is a or c or g or t.
  misc_feature (960838)..(960839): n is a or c or g or t.
  misc_feature (960860)..(960861): n is a or c or g or t.
  misc_feature (960872)..(960873): n is a or c or g or t.
  misc_feature (960879)..(960879): n is a or c or g or t.
  misc_feature (960890)..(960890): n is a or c or g or t.
  misc_feature (1250239)..(1250239): n is a or c or g or t.
  misc_feature (1302432)..(1302434): n is a or c or g or t.
  misc_feature (1302471)..(1302471): n is a or c or g or t.
  misc_feature (1302488)..(1302488): n is a or c or g or t.
  misc_feature (1674836)..(1674836): n is a or c or g or t.
MDNLYQKIPEQVRGNSQLLTAYYSSQTGFNGFRKYQFAFYNPENKTLSIYTFKVYKFLKIWPRMKRSKITCKTPFNYSVLATSPEKLKDFKNCDNCRELLYKGKIYRNGEIESIYLSIEKVPKKSTTYVNFVLVKDSEISAGKITGRVGDHGILRGPLRIQRFASPAFTHERS

SEQ ID NO: 1488 - protein, 378 aa, Thermococcus kodakaraensis KOD1
  misc_feature (321437)..(321437): n is a or c or g or t.
  misc_feature (527833)..(527833): n is a or c or g or t.
  misc_feature (527901)..(527901): n is a or c or g or t.
  misc_feature (527978)..(527978): n is a or c or g or t.
  misc_feature (960838)..(960839): n is a or c or g or t.
  misc_feature (960860)..(960861): n is a or c or g or t.
  misc_feature (960872)..(960873): n is a or c or g or t.
  misc_feature (960879)..(960879): n is a or c or g or t.
  misc_feature (960890)..(960890): n is a or c or g or t.
  misc_feature (1250239)..(1250239): n is a or c or g or t.
  misc_feature (1302432)..(1302434): n is a or c or g or t.
  misc_feature (1302471)..(1302471): n is a or c or g or t.
  misc_feature (1302488)..(1302488): n is a or c or g or t.
  misc_feature (1674836)..(1674836): n is a or c or g or t.
VVAMAVGDKITISVIKADIGGWPGHSRVHPQLVETAEDVLSKAVEDGTIIDFYVATCGDDLQLIMTHKRGVDSPDIHGLAWKAFEEATKVAKELGLYGAGQDLLKDAFSGNVRGMGPGVAEMEITLRKSEPVVTFHMDKTEPGAFNLPIFRMFADPFNTAGLIIDPKMHMGFRFEVWDILEHKRVILNTPEELYDLLALIGAKSRYVIKRVYPKPGHPIPENEPVAVVSTEKLYEVAGEYVGKDDPVAIVRAQSGLPALGEVLEPFAFPHLVSGWMRGSHNGPLMPVPMHQANPTRFDGPPRVVALGWQISPEGKLVGPVDLFDDPAFDYARQKALEITEYMRRHGPFEPHRLPLEEMEYTTLPGVLKRLTDRFEPIE

SEQ ID NO: 1489 - protein, 155 aa, Thermococcus kodakaraensis KOD1
  misc_feature (321437)..(321437): n is a or c or g or t.
  misc_feature (527833)..(527833): n is a or c or g or t.
  misc_feature (527901)..(527901): n is a or c or g or t.
  misc_feature (527978)..(527978): n is a or c or g or t.
  misc_feature (960838)..(960839): n is a or c or g or t.
  misc_feature (960860)..(960861): n is a or c or g or t.
  misc_feature (960872)..(960873): n is a or c or g or t.
  misc_feature (960879)..(960879): n is a or c or g or t.
  misc_feature (960890)..(960890): n is a or c or g or t.
  misc_feature (1250239)..(1250239): n is a or c or g or t.
  misc_feature (1302432)..(1302434): n is a or c or g or t.
  misc_feature (1302471)..(1302471): n is a or c or g or t.
  misc_feature (1302488)..(1302488): n is a or c or g or t.
  misc_feature (1674836)..(1674836): n is a or c or g or t.
MVLTMKSFLTEQQIRVLQLRAKGLKQSEIAEILGTSRANVSILERRALEKIEKARNTLLLWEQINSKISVEVKKGEDIFQVPEKLFKKADELGVKVPYSTAEIIAFLVEHAPIDDRLAKRDFTLFLDREDRLRVSECILEDFDEIGKHEGGKDTI

SEQ ID NO: 1490 - protein, 552 aa, Thermococcus kodakaraensis KOD1
  misc_feature (321437)..(321437): n is a or c or g or t.
  misc_feature (527833)..(527833): n is a or c or g or t.
  misc_feature (527901)..(527901): n is a or c or g or t.
  misc_feature (527978)..(527978): n is a or c or g or t.
  misc_feature (960838)..(960839): n is a or c or g or t.
  misc_feature (960860)..(960861): n is a or c or g or t.
  misc_feature (960872)..(960873): n is a or c or g or t.
  misc_feature (960879)..(960879): n is a or c or g or t.
  misc_feature (960890)..(960890): n is a or c or g or t.
  misc_feature (1250239)..(1250239): n is a or c or g or t.
  misc_feature (1302432)..(1302434): n is a or c or g or t.
  misc_feature (1302471)..(1302471): n is a or c or g or t.
  misc_feature (1302488)..(1302488): n is a or c or g or t.
  misc_feature (1674836)..(1674836): n is a or c or g or t.
VSDFGVLSLLPPLVAIGLAIWTKRVVLALFAGAWIGGLMVSGWNPLTGTTQTLEWVVGSVTDDWNARILVFDFLIGAGVGLIYKSGGVHALAKVLGSRIKTSRGASVLGWLMGVLVFFDDYTNTIIVGNTMRPITDRTRVSREMLAYIDDSTAAPVAGLALISTWIGYELAMIGKGFDGVGITYNSYDAWLSSLPFRFYSILAIILVFIVAYTHRHYGPMLHAEYRARTTGKVLRDGAKPLMTTETDLGAPQPNGSPWDFVIPILTLVIVSLLGLWYTGAANLYAYDQGLDWWTELDNPFGVHFTDYGFVDAFREADAATALLWGSFTMVLVASIMLVGRKKMTVEQWEDTVIRGMKQMLFANTILVLAWTLGTAADSVGTGSYVINLATSSGQDLGPWMPLIMFLAAMFVAFTTGTSWGTFSVMVPLGVQLALAFTGGHVNEIVFATIGATFTGAIFGDHCSPISDTTIMSSMFSGSDHIDHVTTQIPYAVTVASIGAVLYLLFGLGVRSWIILLPLGIVLLVAAWYVLSEWYGKKYGIPHGKVPIYVVEE

SEQ ID NO: 1491 - protein, 300 aa, Thermococcus kodakaraensis KOD1
  misc_feature (321437)..(321437): n is a or c or g or t.
  misc_feature (527833)..(527833): n is a or c or g or t.
  misc_feature (527901)..(527901): n is a or c or g or t.
  misc_feature (527978)..(527978): n is a or c or g or t.
  misc_feature (960838)..(960839): n is a or c or g or t.
  misc_feature (960860)..(960861): n is a or c or g or t.
  misc_feature (960872)..(960873): n is a or c or g or t.
  misc_feature (960879)..(960879): n is a or c or g or t.
  misc_feature (960890)..(960890): n is a or c or g or t.
  misc_feature (1250239)..(1250239): n is a or c or g or t.
  misc_feature (1302432)..(1302434): n is a or c or g or t.
  misc_feature (1302471)..(1302471): n is a or c or g or t.
  misc_feature (1302488)..(1302488): n is a or c or g or t.
  misc_feature (1674836)..(1674836): n is a or c or g or t.
MLIRAFIPAHITAFFVPVFHEEPLKAGSLGAGVNLSKGTNVFASIETGTLERHIHVAFNGEPVKREEAEITYYVAEKLVPKDFLGEVEVWQYFDFPNGYGFGNSAGGALGTALALSYAFGGTWLRAAQLAHEAEVKHKGGLGDVIGQLAGGIEVRIKPGGPGIGVTDNLFFEDYKVLVVPLGRLSTREVLDGDVVKAIEVEGRKALEELLKEPKPERMMVLARNFAEKTGLLPGELSEIARELDKVLKNPSSMIMLGKGLFALVRDEEAEKAKQLLSDMNLPYDIAEIYTERPKVGRWVG

SEQ ID NO: 1492 - protein, 440 aa, Thermococcus kodakaraensis KOD1
  misc_feature (321437)..(321437): n is a or c or g or t.
  misc_feature (527833)..(527833): n is a or c or g or t.
  misc_feature (527901)..(527901): n is a or c or g or t.
  misc_feature (527978)..(527978): n is a or c or g or t.
  misc_feature (960838)..(960839): n is a or c or g or t.
  misc_feature (960860)..(960861): n is a or c or g or t.
  misc_feature (960872)..(960873): n is a or c or g or t.
  misc_feature (960879)..(960879): n is a or c or g or t.
  misc_feature (960890)..(960890): n is a or c or g or t.
  misc_feature (1250239)..(1250239): n is a or c or g or t.
  misc_feature (1302432)..(1302434): n is a or c or g or t.
  misc_feature (1302471)..(1302471): n is a or c or g or t.
  misc_feature (1302488)..(1302488): n is a or c or g or t.
  misc_feature (1674836)..(1674836): n is a or c or g or t.
VNTFVESSARQIYKTVLKIVAMSVIRGTIERLSDEGLGTIRASRREILVPYTAPGDVVEVARWRRKKKKLIATDFKVIEESPIRTEPKCPYFGVCGGCLLQHLPYEKQIEFKSEKLSRYIGTDVDVIPSPVIYGHRNRIDVVISTGGIGFRRYGTWWDAVDIEECPVFGKTSRKVLKSLREFIEDEKPTLYEIRKNAGFLRYIVMREGKFTGELMVNLVTSEGKLPESFPEYFPYATSIYWSVNRTESDVSYGDVERYWGEPFIREKLDDVTYLIHPNSFFQTNSYQAVNLVRKVAELVEGEKVLDLYSGVGTFGIYLAKRGFKVEGIEINPFAVEMAKKNAQINGVDAEFRVGEDKDVNSLSEYDTVVVDPPRAGLHPKLVRKILKDRPETLVYVSCNPKTLSQNLKELSEGYKIEEAVGLDMFPHTPHVEAVLKLRKV

SEQ ID NO: 1493 - protein, 141 aa, Thermococcus kodakaraensis KOD1
  misc_feature (321437)..(321437): n is a or c or g or t.
  misc_feature (527833)..(527833): n is a or c or g or t.
  misc_feature (527901)..(527901): n is a or c or g or t.
  misc_feature (527978)..(527978): n is a or c or g or t.
  misc_feature (960838)..(960839): n is a or c or g or t.
  misc_feature (960860)..(960861): n is a or c or g or t.
  misc_feature (960872)..(960873): n is a or c or g or t.
  misc_feature (960879)..(960879): n is a or c or g or t.
  misc_feature (960890)..(960890): n is a or c or g or t.
  misc_feature (1250239)..(1250239): n is a or c or g or t.
  misc_feature (1302432)..(1302434): n is a or c or g or t.
  misc_feature (1302471)..(1302471): n is a or c or g or t.
  misc_feature (1302488)..(1302488): n is a or c or g or t.
  misc_feature (1674836)..(1674836): n is a or c or g or t.
MLDERDKIILEMLTKDARTPFAEIAKVLGISETAVRKRVKALEEAGVIKQYTIVVDPAKLGYNLVSITGVDTKPEKIFEVANKLKEFDFVKHVYLTSGDHMIMAEVWARDGEHLSEIISEKIGRIDGVTKVCPAIILEKMK

SEQ ID NO: 1494 - protein, 192 aa, Thermococcus kodakaraensis KOD1
  misc_feature (321437)..(321437): n is a or c or g or t.
  misc_feature (527833)..(527833): n is a or c or g or t.
  misc_feature (527901)..(527901): n is a or c or g or t.
  misc_feature (527978)..(527978): n is a or c or g or t.
  misc_feature (960838)..(960839): n is a or c or g or t.
  misc_feature (960860)..(960861): n is a or c or g or t.
  misc_feature (960872)..(960873): n is a or c or g or t.
  misc_feature (960879)..(960879): n is a or c or g or t.
  misc_feature (960890)..(960890): n is a or c or g or t.
  misc_feature (1250239)..(1250239): n is a or c or g or t.
  misc_feature (1302432)..(1302434): n is a or c or g or t.
  misc_feature (1302471)..(1302471): n is a or c or g or t.
  misc_feature (1302488)..(1302488): n is a or c or g or t.
  misc_feature (1674836)..(1674836): n is a or c or g or t.
MRAYDPVTVAIPLAYRLEKIMLEKKSLPSGDEVKTILKELGLEELYSGKGLALLRNQDVVVLVFPRESLVIDVIPATGEVSDALEVIAYHDRKLNALILEVLPANDIEYEGNIGVEPAIISLESGELESAPVFGDFREEEDGIYLVIDKDTLQRWKESGKLDVCPICGGELSWRGKKAICLDCGYGVKVVEE

SEQ ID NO: 1495 - protein, 171 aa, Thermococcus kodakaraensis KOD1
  misc_feature (321437)..(321437): n is a or c or g or t.
  misc_feature (527833)..(527833): n is a or c or g or t.
  misc_feature (527901)..(527901): n is a or c or g or t.
  misc_feature (527978)..(527978): n is a or c or g or t.
  misc_feature (960838)..(960839): n is a or c or g or t.
  misc_feature (960860)..(960861): n is a or c or g or t.
  misc_feature (960872)..(960873): n is a or c or g or t.
  misc_feature (960879)..(960879): n is a or c or g or t.
  misc_feature (960890)..(960890): n is a or c or g or t.
  misc_feature (1250239)..(1250239): n is a or c or g or t.
  misc_feature (1302432)..(1302434): n is a or c or g or t.
  misc_feature (1302471)..(1302471): n is a or c or g or t.
  misc_feature (1302488)..(1302488): n is a or c or g or t.
  misc_feature (1674836)..(1674836): n is a or c or g or t.
MGWLSSIFWAFWYILPAYFANASPVLVGGGRPIDGGRVWRDGRRLLGDGKTWRGFIGGVLIGTLVGIVQYFITPDFYGSLETAVKLAFLLSFGALIGDLVGSFIKRRANLPRGYPAIGLDQLGFLISALAFAYPVKTLSSGQIIFLLVVSPFIHWGANYFAYRMGWKSVPW

SEQ ID NO: 1496 - protein, 313 aa, Thermococcus kodakaraensis KOD1
  misc_feature (321437)..(321437): n is a or c or g or t.
  misc_feature (527833)..(527833): n is a or c or g or t.
  misc_feature (527901)..(527901): n is a or c or g or t.
  misc_feature (527978)..(527978): n is a or c or g or t.
  misc_feature (960838)..(960839): n is a or c or g or t.
  misc_feature (960860)..(960861): n is a or c or g or t.
  misc_feature (960872)..(960873): n is a or c or g or t.
  misc_feature (960879)..(960879): n is a or c or g or t.
  misc_feature (960890)..(960890): n is a or c or g or t.
  misc_feature (1250239)..(1250239): n is a or c or g or t.
  misc_feature (1302432)..(1302434): n is a or c or g or t.
  misc_feature (1302471)..(1302471): n is a or c or g or t.
  misc_feature (1302488)..(1302488): n is a or c or g or t.
  misc_feature (1674836)..(1674836): n is a or c or g or t.
VRIVERVESIATPISMTNKVKNVIIGKPPWSNKKHRGKIERLILQLGAGKGKFSEVTGIPRSIGCIGNNRFILRREPLSLEEFKRAILEFRKMGGKELWLTNYDSIEPLMALANFASEIEIPEVYAVVRFEDIPKITPAEEIRFIAEIKYPDVGPEELSGYPWLHGVLAVVDPDYLEDVTRESFPGELYVDVLYPGSVKKISFNTIEVRRILNPTTEEYHDCLAGTVAVTADGYVLPCPLLRNYIVGDLKKESLRKVTRRKRLRAFWRMTKDNIPACSSCPFKYICHDCRALEYQATGEIDGLEYCPLILMRL

SEQ ID NO: 1497 - protein, 162 aa, Thermococcus kodakaraensis KOD1
  misc_feature (321437)..(321437): n is a or c or g or t.
  misc_feature (527833)..(527833): n is a or c or g or t.
  misc_feature (527901)..(527901): n is a or c or g or t.
  misc_feature (527978)..(527978): n is a or c or g or t.
  misc_feature (960838)..(960839): n is a or c or g or t.
  misc_feature (960860)..(960861): n is a or c or g or t.
  misc_feature (960872)..(960873): n is a or c or g or t.
  misc_feature (960879)..(960879): n is a or c or g or t.
  misc_feature (960890)..(960890): n is a or c or g or t.
  misc_feature (1250239)..(1250239): n is a or c or g or t.
  misc_feature (1302432)..(1302434): n is a or c or g or t.
  misc_feature (1302471)..(1302471): n is a or c or g or t.
  misc_feature (1302488)..(1302488): n is a or c or g or t.
  misc_feature (1674836)..(1674836): n is a or c or g or t.
MVRIEVVDIEKPEGVEVIIGQGNFSIFTVDDLARALLTAVPGIKFGIAMNEAKPQLTRFTGNDKELEELAAKNAVKIGAGHVFVILMRNAFPINVLNTVKNHPAVAMVYGASENPFQVIVAETDLGRSVLGVVDGKAANKIETEEQRKERRELVEKIGYTIH

SEQ ID NO: 1498 - protein, 184 aa, Thermococcus kodakaraensis KOD1
  misc_feature (321437)..(321437): n is a or c or g or t.
  misc_feature (527833)..(527833): n is a or c or g or t.
  misc_feature (527901)..(527901): n is a or c or g or t.
  misc_feature (527978)..(527978): n is a or c or g or t.
  misc_feature (960838)..(960839): n is a or c or g or t.
  misc_feature (960860)..(960861): n is a or c or g or t.
  misc_feature (960872)..(960873): n is a or c or g or t.
  misc_feature (960879)..(960879): n is a or c or g or t.
  misc_feature (960890)..(960890): n is a or c or g or t.
  misc_feature (1250239)..(1250239): n is a or c or g or t.
  misc_feature (1302432)..(1302434): n is a or c or g or t.
  misc_feature (1302471)..(1302471): n is a or c or g or t.
  misc_feature (1302488)..(1302488): n is a or c or g or t.
  misc_feature (1674836)..(1674836): n is a or c or g or t.
MRLAFVTSNPGKVEEARKYFEPLGVEVYQLKVSYPEIQADTLEEVAEYGAKWLAQRVDGPFFLDDSGLFVEALKGFPGVYSAYVYKTIGYQGILKLLQGEKNRKAHFKSVIAYWDGELHIFTGRVDGKIATEPRGSGGFGFDPIFIPEGFDRTFAEMTTEEKNRISHRGRALREFANWLKENLK

SEQ ID NO: 1499 - protein, 183 aa, Thermococcus kodakaraensis KOD1
  misc_feature (321437)..(321437): n is a or c or g or t.
  misc_feature (527833)..(527833): n is a or c or g or t.
  misc_feature (527901)..(527901): n is a or c or g or t.
  misc_feature (527978)..(527978): n is a or c or g or t.
  misc_feature (960838)..(960839): n is a or c or g or t.
  misc_feature (960860)..(960861): n is a or c or g or t.
  misc_feature (960872)..(960873): n is a or c or g or t.
  misc_feature (960879)..(960879): n is a or c or g or t.
  misc_feature (960890)..(960890): n is a or c or g or t.
  misc_feature (1250239)..(1250239): n is a or c or g or t.
  misc_feature (1302432)..(1302434): n is a or c or g or t.
  misc_feature (1302471)..(1302471): n is a or c or g or t.
  misc_feature (1302488)..(1302488): n is a or c or g or t.
  misc_feature (1674836)..(1674836): n is a or c or g or t.
MWRTLIYKPFEGGERMLPEEKIVRDMFTVPIKNMILLIIGLRGETHGYEILKEIEKIAWGIWKPSHGNLYTMLNKMVEEGLIEPKEEYQGRRRRVKYRLTENGWRWLQEANELALKSLYVAIEYHERMRKKLQEKGYSRQEFEREAIKEYLKILDGIIQILETKREQLRKMLEEGEEVTGTGS

SEQ ID NO: 1500 - protein, 97 aa, Thermococcus kodakaraensis KOD1
  misc_feature (321437)..(321437): n is a or c or g or t.
  misc_feature (527833)..(527833): n is a or c or g or t.
  misc_feature (527901)..(527901): n is a or c or g or t.
  misc_feature (527978)..(527978): n is a or c or g or t.
  misc_feature (960838)..(960839): n is a or c or g or t.
  misc_feature (960860)..(960861): n is a or c or g or t.
  misc_feature (960872)..(960873): n is a or c or g or t.
  misc_feature (960879)..(960879): n is a or c or g or t.
  misc_feature (960890)..(960890): n is a or c or g or t.
  misc_feature (1250239)..(1250239): n is a or c or g or t.
  misc_feature (1302432)..(1302434): n is a or c or g or t.
  misc_feature (1302471)..(1302471): n is a or c or g or t.
  misc_feature (1302488)..(1302488): n is a or c or g or t.
  misc_feature (1674836)..(1674836): n is a or c or g or t.
VPPMSEILEVIERIIGELRSEGMNPNIMLAGPQFIEYSKDALKQINLKIYRIEELGYDAVIADSNYLGQIKKASRRVSVEPIIEEKEVWNEIKNLDV

SEQ ID NO: 1501 - protein, 164 aa, Thermococcus kodakaraensis KOD1
  misc_feature (321437)..(321437): n is a or c or g or t.
  misc_feature (527833)..(527833): n is a or c or g or t.
  misc_feature (527901)..(527901): n is a or c or g or t.
  misc_feature (527978)..(527978): n is a or c or g or t.
  misc_feature (960838)..(960839): n is a or c or g or t.
  misc_feature (960860)..(960861): n is a or c or g or t.
  misc_feature (960872)..(960873): n is a or c or g or t.
  misc_feature (960879)..(960879): n is a or c or g or t.
  misc_feature (960890)..(960890): n is a or c or g or t.
  misc_feature (1250239)..(1250239): n is a or c or g or t.
  misc_feature (1302432)..(1302434): n is a or c or g or t.
  misc_feature (1302471)..(1302471): n is a or c or g or t.
  misc_feature (1302488)..(1302488): n is a or c or g or t.
  misc_feature (1674836)..(1674836): n is a or c or g or t.
VIEMVVEILNEIRKLDERELLSYWIKGEYEEAETYWKLAERAKELGLPEEVVNTFKRLGDESKGHGDELYKIYRQNYGDELVEVNVPNVESLNVLGKFWKVEDLKDVLEIAMESEKLAETIYRKLAEECKKEELKRVYLTLADVERGHYESLKKLAGGIVNGRP

SEQ ID NO: 1502 - protein, 370 aa, Thermococcus kodakaraensis KOD1
  misc_feature (321437)..(321437): n is a or c or g or t.
  misc_feature (527833)..(527833): n is a or c or g or t.
  misc_feature (527901)..(527901): n is a or c or g or t.
  misc_feature (527978)..(527978): n is a or c or g or t.
  misc_feature (960838)..(960839): n is a or c or g or t.
  misc_feature (960860)..(960861): n is a or c or g or t.
  misc_feature (960872)..(960873): n is a or c or g or t.
  misc_feature (960879)..(960879): n is a or c or g or t.
  misc_feature (960890)..(960890): n is a or c or g or t.
  misc_feature (1250239)..(1250239): n is a or c or g or t.
  misc_feature (1302432)..(1302434): n is a or c or g or t.
  misc_feature (1302471)..(1302471): n is a or c or g or t.
  misc_feature (1302488)..(1302488): n is a or c or g or t.
  misc_feature (1674836)..(1674836): n is a or c or g or t.
VVRLRYVKLPKENTYTFLERLKEWGKLYAPVKISEKFYDFREIDDVRKVEFNYNRTIMPPKKFFFLPREKLFEFDLSRPEYRETIEDVEPFVIFGLHACDIHGLKILDTVYLDELPDKYYKARREKGIIIGISCMPDEYCFCNLRETDFADDGFDLFLHELPDGWLVRVGSPTGHRIVDKNMELFEEVTTEDICNFREFENKRSQAFKYHEDWSNLRYLLELEMEHPMWEEQADLCLACGICNTTCPTCRCYEVQDIVNLDGNTGYRERRWDSCQFRSHGLVAGGHNFRPTKKDRFRNRYLCKNSYNEKLGLSYCVGCGRCTYFCPAGISFVRNLRTILGLEEKSCPSEITEEIPKRGFAYASHIRGDGL

SEQ ID NO: 1503 - protein, 267 aa, Thermococcus kodakaraensis KOD1
  misc_feature (321437)..(321437): n is a or c or g or t.
  misc_feature (527833)..(527833): n is a or c or g or t.
  misc_feature (527901)..(527901): n is a or c or g or t.
  misc_feature (527978)..(527978): n is a or c or g or t.
  misc_feature (960838)..(960839): n is a or c or g or t.
  misc_feature (960860)..(960861): n is a or c or g or t.
  misc_feature (960872)..(960873): n is a or c or g or t.
  misc_feature (960879)..(960879): n is a or c or g or t.
  misc_feature (960890)..(960890): n is a or c or g or t.
  misc_feature (1250239)..(1250239): n is a or c or g or t.
  misc_feature (1302432)..(1302434): n is a or c or g or t.
  misc_feature (1302471)..(1302471): n is a or c or g or t.
  misc_feature (1302488)..(1302488): n is a or c or g or t.
  misc_feature (1674836)..(1674836): n is a or c or g or t.
VMKMSEKKIRIGFYALTSCYGCQLQFAMMDEILQLIPNVEIACWFMLERDSYEDEPVDIAFIEGSVSTEEEAELVKKIRENAKIVVAVGSCAVQGGVQSWEKDKPLEELWKTVYGDAKVKFQPKMAEPISNYIKVDYNIYGCPPEKRDFLYTLGTLLIGSWPEDIDYPVCLECRLRGNTCVLLERGEPCLGPVTRAGCDARCPAYGIACIGCRGAIGYDVAWFDSLARVFREKGLTKEEILERMRMFNAHNPKLEEMVNKIFQEVKE

SEQ ID NO: 1504 - protein, 427 aa, Thermococcus kodakaraensis KOD1
  misc_feature (321437)..(321437): n is a or c or g or t.
  misc_feature (527833)..(527833): n is a or c or g or t.
  misc_feature (527901)..(527901): n is a or c or g or t.
  misc_feature (527978)..(527978): n is a or c or g or t.
  misc_feature (960838)..(960839): n is a or c or g or t.
  misc_feature (960860)..(960861): n is a or c or g or t.
  misc_feature (960872)..(960873): n is a or c or g or t.
  misc_feature (960879)..(960879): n is a or c or g or t.
  misc_feature (960890)..(960890): n is a or c or g or t.
  misc_feature (1250239)..(1250239): n is a or c or g or t.
  misc_feature (1302432)..(1302434): n is a or c or g or t.
  misc_feature (1302471)..(1302471): n is a or c or g or t.
  misc_feature (1302488)..(1302488): n is a or c or g or t.
  misc_feature (1674836)..(1674836): n is a or c or g or t.
MVRVYVESYGCTRNKADGEIMEAILLRAGYELAESPESADYVVVNTCAVKDPTEHKMARRIRELLDSGKKVIATGCLVHVNPDVIDPRVSGMLGVKSIDRIAEAIDLAERGGKLVSVEGWKERKVDKLELPRLWKSGVVFVVPISEGCLNACTYCATRFARGVLKSYKPELVLKWVKEALARGYKEIQLSSEDTGCYGFDIGTNLAELLDEITAIEGDFRIRVGMMNPNHVIKFLDELIEVYQDPKVYKFLHLPVQSGDNEVLRRMGRNYTVEEFEEIVSEFRRKIPGLNLNTDIIVGFPGEGEEAFQNTVELVKRVRPDKINVSRYSPRPGTIAAKWKQLPGWKVKERSRILHRLRLQIAYEINQTYLGKKVEVLVHGPGEKGGIDARTFNYKEIILDAGEKGEITRAKITWAGSTYLRGEMEKSE

SEQ ID NO: 1505 - protein, 406 aa, Thermococcus kodakaraensis KOD1
  misc_feature (321437)..(321437): n is a or c or g or t.
  misc_feature (527833)..(527833): n is a or c or g or t.
  misc_feature (527901)..(527901): n is a or c or g or t.
  misc_feature (527978)..(527978): n is a or c or g or t.
  misc_feature (960838)..(960839): n is a or c or g or t.
  misc_feature (960860)..(960861): n is a or c or g or t.
  misc_feature (960872)..(960873): n is a or c or g or t.
  misc_feature (960879)..(960879): n is a or c or g or t.
  misc_feature (960890)..(960890): n is a or c or g or t.
  misc_feature (1250239)..(1250239): n is a or c or g or t.
  misc_feature (1302432)..(1302434): n is a or c or g or t.
  misc_feature (1302471)..(1302471): n is a or c or g or t.
  misc_feature (1302488)..(1302488): n is a or c or g or t.
  misc_feature (1674836)..(1674836): n is a or c or g or t.
VAVMDPWLLITIIVGFGMAWAIGANDAANSMSTAVGAKAITPKQAVLIAGVLEFTGAYFFGKSVTETIRKGILYPDRITDPTVLIYGSVAALLAATIWLVIATKFGLPVSTTHSIIGGIVGYGIVYAGFSIVNWGKMTQVVLSWILSPIIGAIMAFLVFKALTKSIFERKDPVRSSKIWSPFWIGLAFVVIGTMFYIKVLHGKSLKTGVLFYGIPAGLVVFLILFLTLRVKFPSSDPFIGVESIFRRVQVITSGYVALAHGANDVANAIGPVAAVYAVATMGMAGMKVPVPRWILAMGGLGIAIGVATYGYRVMETVGKKITELTNTRGFTIDFSAATVVLVASWLGLPISTTHVVVGAVIGVGLARGVKAINKDIVRDIIISWFVTVPVAALISAFLFKILMIVG

SEQ ID NO: 1506 - protein, 515 aa, Thermococcus kodakaraensis KOD1
  misc_feature (321437)..(321437): n is a or c or g or t.
  misc_feature (527833)..(527833): n is a or c or g or t.
  misc_feature (527901)..(527901): n is a or c or g or t.
  misc_feature (527978)..(527978): n is a or c or g or t.
  misc_feature (960838)..(960839): n is a or c or g or t.
  misc_feature (960860)..(960861): n is a or c or g or t.
  misc_feature (960872)..(960873): n is a or c or g or t.
  misc_feature (960879)..(960879): n is a or c or g or t.
  misc_feature (960890)..(960890): n is a or c or g or t.
  misc_feature (1250239)..(1250239): n is a or c or g or t.
  misc_feature (1302432)..(1302434): n is a or c or g or t.
  misc_feature (1302471)..(1302471): n is a or c or g or t.
  misc_feature (1302488)..(1302488): n is a or c or g or t.
  misc_feature (1674836)..(1674836): n is a or c or g or t.
MKGAKLMERIGTNHPVIVFLLSLFPAIGVELELYYFSVHNITLPPEKLGYLVTLRLLTEWLPVFLKYLIFPVILILLLSRFGSDFERGNLVLMLSKPLTRRRYFLNWVIEGLKLALASTIGIVLSGALAMFLHDFEVRDYVLGSLALSLSLIGVIGIALLLLPLATSRDFGVVLGLGAFVILALAGGLDYSFIPTVYLGKVLSLESEISISHRSVGELLALSLALSIAGMEIFRLTELRGSRSLPAEVPVGVSSPLRGLYGVFLGLSLQSKRFIAFAVFSGLMALMKLPSLSKGYTHYGPAGLLNSLIFNLSGVPLPLVVLPLGALSISSTVENGTARVLLSKPLRRKDFFLGTLLSDVVAVFLGTALYAGVLIAYAVHLGGGRRAVEIGLVFGVLLFLSLLYYLALGYLLSTLTGGRKALLTSILLAFLLDFAVPIAFMAVFGRSEEFARKALYFPVPEVQHSVLASAVSPKKALPPGPLDSILDYEANLLMLIVPTVLYLVASWLKFKKADLR

SEQ ID NO: 1507 - protein, 622 aa, Thermococcus kodakaraensis KOD1
  misc_feature (321437)..(321437): n is a or c or g or t.
  misc_feature (527833)..(527833): n is a or c or g or t.
  misc_feature (527901)..(527901): n is a or c or g or t.
  misc_feature (527978)..(527978): n is a or c or g or t.
  misc_feature (960838)..(960839): n is a or c or g or t.
  misc_feature (960860)..(960861): n is a or c or g or t.
  misc_feature (960872)..(960873): n is a or c or g or t.
  misc_feature (960879)..(960879): n is a or c or g or t.
  misc_feature (960890)..(960890): n is a or c or g or t.
  misc_feature (1250239)..(1250239): n is a or c or g or t.
  misc_feature (1302432)..(1302434): n is a or c or g or t.
  misc_feature (1302471)..(1302471): n is a or c or g or t.
  misc_feature (1302488)..(1302488): n is a or c or g or t.
  misc_feature (1674836)..(1674836): n is a or c or g or t.
MSSIEWNEKTFSKFAYLGDPRIRGSKVAYVLTKVNMKDNKYESTVVVEDLERGTKRFVENASMPRISPDGKKLAFMRSNEEKKETEIWVADIETLSAKKVLSAKNIRSVQWNDDSRRLLVVGFKRRDDEDFVFDDDVPVWFDNMGFLDGEKTTFWILDTESEEILEEFEKPRFSSGVWHGDGVVINVPHREGSKPALFKFYDIYLWKDGDEEKLFERVSFEAVDSDGKAILLHGKREKKFMSEHDWLYLWDGELKPVYEGPLNTGSAKLDGGKVYFTVPDAGRVNLYLWDGEVKPLIVGDHWIMGFDVHDGRIALLIETATRLRELYLYDGELKQITDYNGPIFAKLKTFEPRHFLFRSKDLEIDGWYIRPELNEGEKAPVIVFVHGGPKGMYGHYFKYEMQLMASKGYYVVFVNPRGSNGYDEDFALRVLERTGLEDFEDIMNGIEEFLKLEPQADRERVGITGISYGGYMTNWAVTQSDLFKAGISENGISYWLTSYAFSDIGLWYDVEVIGPNPLENENYRKLSPLFYADRVKAPLLLIHSLEDYRCPLDQSLMFYNVLKDLGKEAYIAIFRRGAHGHSIRGSPKHRAKRYKLFIEFFERKLKKYEEGFEVEKILKGDS

SEQ ID NO: 1508 - protein, 992 aa, Thermococcus kodakaraensis KOD1
  misc_feature (321437)..(321437): n is a or c or g or t.
  misc_feature (527833)..(527833): n is a or c or g or t.
  misc_feature (527901)..(527901): n is a or c or g or t.
  misc_feature (527978)..(527978): n is a or c or g or t.
  misc_feature (960838)..(960839): n is a or c or g or t.
  misc_feature (960860)..(960861): n is a or c or g or t.
  misc_feature (960872)..(960873): n is a or c or g or t.
  misc_feature (960879)..(960879): n is a or c or g or t.
  misc_feature (960890)..(960890): n is a or c or g or t.
  misc_feature (1250239)..(1250239): n is a or c or g or t.
  misc_feature (1302432)..(1302434): n is a or c or g or t.
  misc_feature (1302471)..(1302471): n is a or c or g or t.
  misc_feature (1302488)..(1302488): n is a or c or g or t.
  misc_feature (1674836)..(1674836): n is a or c or g or t.
MAGEKQEKKLYYHGLKEQKKIDVSKLKYLSLLLSVIGVAVLLVAAQSAQAPLMKVSDVTGNYMMNYAVVRLSGTISSVPYVSESGGKLSLTFTIDDGTGQMDVRVYSPLADEMVEKGVIPFPGDNVTAEVQLRVRETYTYAILQYLGGLEFNNKLYSESPKTVMELTENMSNTYVAVQGVVTEFSNVSSGYLLTVDTGVAPVTVLIPRVLLIKNNVSVKVGDTVYAPGIVYLYKGTSPEIVVRSLEQFNVTPIESAPLVPLAEAPGYVGMVMSVQGSLTGITYESGRYVLTLTDGTNYLEVLVPREVLANLNPFELASGSLIKAAGKMGDDGRLVGAYLGVIEAVKTEFLPIGVLTPDMKGTIVAVKANIEDVQNVGSNLKLVVSDGTGKIDVFIPSAALRELSNETLADLKEGLGVEVAGYLDEYRGSLEVVVYTGSGIKALGRPVGSSEVELPKVKASELGKYTGKLVDFVGSLQGLTYANGTYYLNVDSVTVSISRDVLMALNPLDAGEGSVLVIRGFVKDPNNLKGESLTVQAAVPPVQIKPEDVTSDMVGKVVAVAGRVTDVANLSGNLKITLGSLPVFVPRTTANELAYVPQEGDLVEIGGYVELYRDEPEIVVFHPEAIRKIGASGPVEGTVSDLKSATEPLLLTVTWDSLSYESGEYYLGIHDDTGSTTVTATKDLLPNPLEAATGSTLKLVVDPLSGSVTSLEIAKAVPPKLYQTGEVTLDMKGKVIALNATAVKVAAVGDNLKLTLDDGSGGIAVFIPNGAELSVDEGSVVYTAGYVEEYNGAPELVVYTTEAVKVEGAPSQGGTETTKEVTVSELSSATGQVNLTVVWDSLDYDNGYYITVSDDTGSATLSISRELLPNPFEAGTGSRIEITYDADAKKVVSLTVIEAIPSETYKTGDVTLDMKGKTVIVEGTIKDVYEGRTFIKLTIDDGSGELVIFIPKSVGGDLTFSEGQTIRVGGYVTEYKGTVEVIPYTADAIEVR

SEQ ID NO: 1509 - protein, 233 aa, Thermococcus kodakaraensis KOD1
  misc_feature (321437)..(321437): n is a or c or g or t.
  misc_feature (527833)..(527833): n is a or c or g or t.
  misc_feature (527901)..(527901): n is a or c or g or t.
  misc_feature (527978)..(527978): n is a or c or g or t.
  misc_feature (960838)..(960839): n is a or c or g or t.
  misc_feature (960860)..(960861): n is a or c or g or t.
  misc_feature (960872)..(960873): n is a or c or g or t.
  misc_feature (960879)..(960879): n is a or c or g or t.
  misc_feature (960890)..(960890): n is a or c or g or t.
  misc_feature (1250239)..(1250239): n is a or c or g or t.
  misc_feature (1302432)..(1302434): n is a or c or g or t.
  misc_feature (1302471)..(1302471): n is a or c or g or t.
  misc_feature (1302488)..(1302488): n is a or c or g or t.
  misc_feature (1674836)..(1674836): n is a or c or g or t.
MITGRVERVPTGIEGFDPLIEGGFVKSKSYLITGPPGSGKTTFGVQFLVDGAKRGEKVAYISLVQDPEEVIKDYERFDPAVWNYVQKGNLILYDLGKELWGSTAKPPQWSSVMFRIKDLVRESNITRLVIDPLTAIDFPTSDPAEKRAELATFLRTMSALGITSLLIAELTDLDRYSEEHYLVDGVIMLHYYLEGNDMARAIQVLKMRRTRHETKMYRLEFGPKGLVVRGPVL

SEQ ID NO: 1510 - protein, 164 aa, Thermococcus kodakaraensis KOD1
  misc_feature (321437)..(321437): n is a or c or g or t.
  misc_feature (527833)..(527833): n is a or c or g or t.
  misc_feature (527901)..(527901): n is a or c or g or t.
  misc_feature (527978)..(527978): n is a or c or g or t.
  misc_feature (960838)..(960839): n is a or c or g or t.
  misc_feature (960860)..(960861): n is a or c or g or t.
  misc_feature (960872)..(960873): n is a or c or g or t.
  misc_feature (960879)..(960879): n is a or c or g or t.
  misc_feature (960890)..(960890): n is a or c or g or t.
  misc_feature (1250239)..(1250239): n is a or c or g or t.
  misc_feature (1302432)..(1302434): n is a or c or g or t.
  misc_feature (1302471)..(1302471): n is a or c or g or t.
  misc_feature (1302488)..(1302488): n is a or c or g or t.
  misc_feature (1674836)..(1674836): n is a or c or g or t.
MEEWKKDVAWVVLTIIIVAGIHSGLRFVLHTDSPLVIVVSGSMEPVFYRGDVVLLKGVTDPSQVRVNDVIVYKRPGYPYPIIHRVRYISTVKLNGKEETCFVTWGDNNPVPDPPYPTSQGSLEVRMPNGMIAGCVPSYAVEAKAELVFPKIGLIPLWIRERIGL

SEQ ID NO: 1511 - protein, 92 aa, Thermococcus kodakaraensis KOD1
  misc_feature (321437)..(321437): n is a or c or g or t.
  misc_feature (527833)..(527833): n is a or c or g or t.
  misc_feature (527901)..(527901): n is a or c or g or t.
  misc_feature (527978)..(527978): n is a or c or g or t.
  misc_feature (960838)..(960839): n is a or c or g or t.
  misc_feature (960860)..(960861): n is a or c or g or t.
  misc_feature (960872)..(960873): n is a or c or g or t.
  misc_feature (960879)..(960879): n is a or c or g or t.
  misc_feature (960890)..(960890): n is a or c or g or t.
  misc_feature (1250239)..(1250239): n is a or c or g or t.
  misc_feature (1302432)..(1302434): n is a or c or g or t.
  misc_feature (1302471)..(1302471): n is a or c or g or t.
  misc_feature (1302488)..(1302488): n is a or c or g or t.
  misc_feature (1674836)..(1674836): n is a or c or g or t.
VMKRVRAHLRIYGRVQGVGFRWSMSREARKLGVHGWVRNLPDGTVEAVIEGDPERVEALIGWAHQGPPLARVTRVEVKWEEPEGLEGFKVVG

SEQ ID NO: 1512 - protein, 232 aa, Thermococcus kodakaraensis KOD1
  misc_feature (321437)..(321437): n is a or c or g or t.
  misc_feature (527833)..(527833): n is a or c or g or t.
  misc_feature (527901)..(527901): n is a or c or g or t.
  misc_feature (527978)..(527978): n is a or c or g or t.
  misc_feature (960838)..(960839): n is a or c or g or t.
  misc_feature (960860)..(960861): n is a or c or g or t.
  misc_feature (960872)..(960873): n is a or c or g or t.
  misc_feature (960879)..(960879): n is a or c or g or t.
  misc_feature (960890)..(960890): n is a or c or g or t.
  misc_feature (1250239)..(1250239): n is a or c or g or t.
  misc_feature (1302432)..(1302434): n is a or c or g or t.
  misc_feature (1302471)..(1302471): n is a or c or g or t.
  misc_feature (1302488)..(1302488): n is a or c or g or t.
  misc_feature (1674836)..(1674836): n is a or c or g or t.
MSFSVHYSFYGDGKGIYIIGPYFSIGVYPLRRLYPLRIKSNSGRLLSVAKRKNKELLEIAQEIGGEEAVEVVKALEKMKEATDEELAEATGIRVNTVRRILYMLNDEGLADFKRIRDPETGWYYYYWRLETKKLPEIIRSRKMAELKKLKEMLEEETSEIYYWCGTEGHPKLTFDEAMEYEFQCPICGKMLMQYDNTHIIEELKRRIEELEIELGLKKKPRKTSKKKKSRSE

SEQ ID NO: 1513 - protein, 249 aa, Thermococcus kodakaraensis KOD1
  misc_feature (321437)..(321437): n is a or c or g or t.
  misc_feature (527833)..(527833): n is a or c or g or t.
  misc_feature (527901)..(527901): n is a or c or g or t.
  misc_feature (527978)..(527978): n is a or c or g or t.
  misc_feature (960838)..(960839): n is a or c or g or t.
  misc_feature (960860)..(960861): n is a or c or g or t.
  misc_feature (960872)..(960873): n is a or c or g or t.
  misc_feature (960879)..(960879): n is a or c or g or t.
  misc_feature (960890)..(960890): n is a or c or g or t.
  misc_feature (1250239)..(1250239): n is a or c or g or t.
  misc_feature (1302432)..(1302434): n is a or c or g or t.
  misc_feature (1302471)..(1302471): n is a or c or g or t.
  misc_feature (1302488)..(1302488): n is a or c or g or t.
  misc_feature (1674836)..(1674836): n is a or c or g or t.
MVKMREVVILEKVYGDRSGFEKLNKKLRSLLGELDVEWKLSAVKKNWVKVTLSGEDEEVSANLVREEFGEVPYSLKNVEEGQSYRGRFIDLGKVGYGAYVDIGVFRPAPKDALLPLYYLKKTFGDIPVRGMIRRFGWVDNLPVEVEVTRVEFGAREVELAFTEEQLKRIKSWISDGFDKLFVVGTISEKVEEALIRTGHGRDVKRLEELGLMETLLVLKKGTQAPGIIKAIGPHLPGAVFGAIKFEEKP

SEQ ID NO: 1514 - protein, 138 aa, Thermococcus kodakaraensis KOD1
  misc_feature (321437)..(321437): n is a or c or g or t.
  misc_feature (527833)..(527833): n is a or c or g or t.
  misc_feature (527901)..(527901): n is a or c or g or t.
  misc_feature (527978)..(527978): n is a or c or g or t.
  misc_feature (960838)..(960839): n is a or c or g or t.
  misc_feature (960860)..(960861): n is a or c or g or t.
  misc_feature (960872)..(960873): n is a or c or g or t.
  misc_feature (960879)..(960879): n is a or c or g or t.
  misc_feature (960890)..(960890): n is a or c or g or t.
  misc_feature (1250239)..(1250239): n is a or c or g or t.
  misc_feature (1302432)..(1302434): n is a or c or g or t.
  misc_feature (1302471)..(1302471): n is a or c or g or t.
  misc_feature (1302488)..(1302488): n is a or c or g or t.
  misc_feature (1674836)..(1674836): n is a or c or g or t.
MIHGCGGDSMRIALPVDEDLGLESPMSGHFGRARYFAFVDVEDGEIRGVEVVPVPFEEHGPGDLPNFIKEHGAEVVIVYGMGRRAMEYFNQFGITVVTGAYGKVGDVVKAFIEQVLEVDPHWKEKIEREKEKGGHCEH

SEQ ID NO: 1515 - protein, 141 aa, Thermococcus kodakaraensis KOD1
  misc_feature (321437)..(321437): n is a or c or g or t.
  misc_feature (527833)..(527833): n is a or c or g or t.
  misc_feature (527901)..(527901): n is a or c or g or t.
  misc_feature (527978)..(527978): n is a or c or g or t.
  misc_feature (960838)..(960839): n is a or c or g or t.
  misc_feature (960860)..(960861): n is a or c or g or t.
  misc_feature (960872)..(960873): n is a or c or g or t.
  misc_feature (960879)..(960879): n is a or c or g or t.
  misc_feature (960890)..(960890): n is a or c or g or t.
  misc_feature (1250239)..(1250239): n is a or c or g or t.
  misc_feature (1302432)..(1302434): n is a or c or g or t.
  misc_feature (1302471)..(1302471): n is a or c or g or t.
  misc_feature (1302488)..(1302488): n is a or c or g or t.
  misc_feature (1674836)..(1674836): n is a or c or g or t.
VGEMADVKAPVIGRDALGREVKDLSVIPWWGVDRKEIEWYPKINYSVCARCGLCFITCGRRVFDWDTEEGKPVVARPYNCMVGCNTCAILCPCNAIEFPPKEYVKKLVIEHGIIRKAFEITKPLTKKKEESTNGAESVFNP

SEQ ID NO: 1516 - protein, 139 aa, Thermococcus kodakaraensis KOD1
  misc_feature (321437)..(321437): n is a or c or g or t.
  misc_feature (527833)..(527833): n is a or c or g or t.
  misc_feature (527901)..(527901): n is a or c or g or t.
  misc_feature (527978)..(527978): n is a or c or g or t.
  misc_feature (960838)..(960839): n is a or c or g or t.
  misc_feature (960860)..(960861): n is a or c or g or t.
  misc_feature (960872)..(960873): n is a or c or g or t.
  misc_feature (960879)..(960879): n is a or c or g or t.
  misc_feature (960890)..(960890): n is a or c or g or t.
  misc_feature (1250239)..(1250239): n is a or c or g or t.
  misc_feature (1302432)..(1302434): n is a or c or g or t.
  misc_feature (1302471)..(1302471): n is a or c or g or t.
  misc_feature (1302488)..(1302488): n is a or c or g or t.
  misc_feature (1674836)..(1674836): n is a or c or g or t.
MHEWALADAIVRTVLDYAQREGASRVKAVRVVLGELQDVAEDIVKFAMEQLFAGTIAEGAEIEFVEEEAVFKCRNCNYEWKLKEVKDKFDERIKEDIHFIPEVVHAFLACPKCGSHDFEVVKGRGVYVAGIKIEKEGGS

SEQ ID NO: 1517 - protein, 72 aa, Thermococcus kodakaraensis KOD1
  misc_feature (321437)..(321437): n is a or c or g or t.
  misc_feature (527833)..(527833): n is a or c or g or t.
  misc_feature (527901)..(527901): n is a or c or g or t.
  misc_feature (527978)..(527978): n is a or c or g or t.
  misc_feature (960838)..(960839): n is a or c or g or t.
  misc_feature (960860)..(960861): n is a or c or g or t.
  misc_feature (960872)..(960873): n is a or c or g or t.
  misc_feature (960879)..(960879): n is a or c or g or t.
  misc_feature (960890)..(960890): n is a or c or g or t.
  misc_feature (1250239)..(1250239): n is a or c or g or t.
  misc_feature (1302432)..(1302434): n is a or c or g or t.
  misc_feature (1302471)..(1302471): n is a or c or g or t.
  misc_feature (1302488)..(1302488): n is a or c or g or t.
  misc_feature (1674836)..(1674836): n is a or c or g or t.
VVKMGTITIHVPAGIDPRIARGFAKLVEERLRELAELNNILKNSTLTNEDIEEIAKDIGARRRAFFERKNSG

SEQ ID NO: 1518 - protein, 79 aa, Thermococcus kodakaraensis KOD1
  misc_feature (321437)..(321437): n is a or c or g or t.
  misc_feature (527833)..(527833): n is a or c or g or t.
  misc_feature (527901)..(527901): n is a or c or g or t.
  misc_feature (527978)..(527978): n is a or c or g or t.
  misc_feature (960838)..(960839): n is a or c or g or t.
  misc_feature (960860)..(960861): n is a or c or g or t.
  misc_feature (960872)..(960873): n is a or c or g or t.
  misc_feature (960879)..(960879): n is a or c or g or t.
  misc_feature (960890)..(960890): n is a or c or g or t.
  misc_feature (1250239)..(1250239): n is a or c or g or t.
  misc_feature (1302432)..(1302434): n is a or c or g or t.
  misc_feature (1302471)..(1302471): n is a or c or g or t.
  misc_feature (1302488)..(1302488): n is a or c or g or t.
  misc_feature (1674836)..(1674836): n is a or c or g or t.
VVRKMCLAVPGKVIEVNGPVAVVDFGGVKREVRLDLMPDTKPGDWVIVHTGFAIEKLDEKKAMEILEAWAEVEKAMEGF

SEQ ID NO: 1519 - protein, 795 aa, Thermococcus kodakaraensis KOD1
  misc_feature (321437)..(321437): n is a or c or g or t.
  misc_feature (527833)..(527833): n is a or c or g or t.
  misc_feature (527901)..(527901): n is a or c or g or t.
  misc_feature (527978)..(527978): n is a or c or g or t.
  misc_feature (960838)..(960839): n is a or c or g or t.
  misc_feature (960860)..(960861): n is a or c or g or t.
  misc_feature (960872)..(960873): n is a or c or g or t.
  misc_feature (960879)..(960879): n is a or c or g or t.
  misc_feature (960890)..(960890): n is a or c or g or t.
  misc_feature (1250239)..(1250239): n is a or c or g or t.
  misc_feature (1302432)..(1302434): n is a or c or g or t.
  misc_feature (1302471)..(1302471): n is a or c or g or t.
  misc_feature (1302488)..(1302488): n is a or c or g or t.
  misc_feature (1674836)..(1674836): n is a or c or g or t.
MVFNFWFWKGIKAQKVKTKPVRGMKAYHIHVQGIVQAVGFRPFVYRIAHEHNLRGYVKNLGDAGVEIVVEGREEDIEAFIEDLYKKKPPLARIDRIEKKEIPPQGFDRFYIEKSSKGGKGGDSIIPPDIAICDDCLRELFDPTNKRYMYPFIVCTNCGPRFTIIEDLPYDRENTTMKEFPMCDFCRSEYEDPLNRRYHAEPTACPVCGPSYRLYTSDGQEIYGDPLRKAAELIDKGYIVAIKGIGGIHLACDAANEEVVAELRRRTFRPQKPFAIMAKDIETVKSFAYVSPEEEEELTSYRRPIITLRKKEPFPLPENLAPGLHTIGVMLPYAGTHYILFHWSKTPVYVMTSANYPGMPMVKDNERAFEELKDVADYFLLHNRKILNRADDSVIRFVDGKRAVIRRSRGFVPLPIEIPFEYNGLAVGAELMNAFGVAKNGKVYPSQYIGNTGKVEVLEFMREAIAHFRKILRVKNLDLIIADLHPAYNTTKLAMEMANELDVELLQVQHHYAHIASVMAEKNLDSVIGIALDGVGYGTDGNTWGGEVLYLGYEDVERLAHIDYYPLPGGDLASYYPLRALMGILSKVYSIDELEGVINRCCPKAVESLKYGKVEFNVVLNQLAKGINTAYASSTGRVLDAIAVLLNVAYRRHYEGEPAMKLESFAFKGKNDLKFEVPVEGELIRVEELFQSILEAIEGASPADIAYSAHLALARAFAHTAVERAREFGVKNVALSGGVAYNELITKMIRKVVEANGLNFHVTTEVPRGDNGVNVGQAFLGGLYLEGYLTKEDLML

SEQ ID NO: 1520 - protein, 34 aa, Thermococcus kodakaraensis KOD1
  misc_feature (321437)..(321437): n is a or c or g or t.
  misc_feature (527833)..(527833): n is a or c or g or t.
  misc_feature (527901)..(527901): n is a or c or g or t.
  misc_feature (527978)..(527978): n is a or c or g or t.
  misc_feature (960838)..(960839): n is a or c or g or t.
  misc_feature (960860)..(960861): n is a or c or g or t.
  misc_feature (960872)..(960873): n is a or c or g or t.
  misc_feature (960879)..(960879): n is a or c or g or t.
  misc_feature (960890)..(960890): n is a or c or g or t.
  misc_feature (1250239)..(1250239): n is a or c or g or t.
  misc_feature (1302432)..(1302434): n is a or c or g or t.
  misc_feature (1302471)..(1302471): n is a or c or g or t.
  misc_feature (1302488)..(1302488): n is a or c or g or t.
  misc_feature (1674836)..(1674836): n is a or c or g or t.
MIAAICITNGEKLITHDSDFKDIREVSELDVEVV

SEQ ID NO: 1521 - protein, 399 aa, Thermococcus kodakaraensis KOD1
  misc_feature (321437)..(321437): n is a or c or g or t.
  misc_feature (527833)..(527833): n is a or c or g or t.
  misc_feature (527901)..(527901): n is a or c or g or t.
  misc_feature (527978)..(527978): n is a or c or g or t.
  misc_feature (960838)..(960839): n is a or c or g or t.
  misc_feature (960860)..(960861): n is a or c or g or t.
  misc_feature (960872)..(960873): n is a or c or g or t.
  misc_feature (960879)..(960879): n is a or c or g or t.
  misc_feature (960890)..(960890): n is a or c or g or t.
  misc_feature (1250239)..(1250239): n is a or c or g or t.
  misc_feature (1302432)..(1302434): n is a or c or g or t.
  misc_feature (1302471)..(1302471): n is a or c or g or t.
  misc_feature (1302488)..(1302488): n is a or c or g or t.
  misc_feature (1674836)..(1674836): n is a or c or g or t.
MKIPDDIRKDIPLTSEVIYFDNTATSLTPKPVIEAMDEYYLKYRANVHRGVHRLSQIATHKYEESRKVVADFINAKFEEIVFTKNTSESLNLVALGLEHIFEKGDKIVTTPYEHHSDLLPWQRLAKKKGLRLEFIEGDLEGNLDLADAEKKIKGAKLVAVQHVSNALGVIHEVEELGKMAKEEGAIFVVDAAQSAGHMEVDVKKLYADFLGFSGHKGPMGPTGIGVLYINSEFFDVFEPPLIGGGTIEDVDLDSYKLAEPPERFEAGTPNIGGAIGLAAGIRYIERIGIEKIEKQEHKLVKRTTEGLDELEVPWYGPRNLKKHAGVVSFNVPPLHPHDVAAILDEHNIMVRSGHHCALPAMKKLGVEGTVRASFHVYNSVEEVETFLSVMENLIRGLRG

SEQ ID NO: 1522 - protein, 121 aa, Thermococcus kodakaraensis KOD1
  misc_feature (321437)..(321437): n is a or c or g or t.
  misc_feature (527833)..(527833): n is a or c or g or t.
  misc_feature (527901)..(527901): n is a or c or g or t.
  misc_feature (527978)..(527978): n is a or c or g or t.
  misc_feature (960838)..(960839): n is a or c or g or t.
  misc_feature (960860)..(960861): n is a or c or g or t.
  misc_feature (960872)..(960873): n is a or c or g or t.
  misc_feature (960879)..(960879): n is a or c or g or t.
  misc_feature (960890)..(960890): n is a or c or g or t.
  misc_feature (1250239)..(1250239): n is a or c or g or t.
  misc_feature (1302432)..(1302434): n is a or c or g or t.
  misc_feature (1302471)..(1302471): n is a or c or g or t.
  misc_feature (1302488)..(1302488): n is a or c or g or t.
  misc_feature (1674836)..(1674836): n is a or c or g or t.
VIFMENGDVMVKLKEIEELLEKLGKEHPKEIAAFSRFLRETLDNKALTTREKELIALALGIAAGCEWCIYLHTQKALEAGAKPEELIEAGLVAVLMAGGPALMHLIPLVKAIESFQKEHGE

SEQ ID NO: 1523 - protein, 309 aa, Thermococcus kodakaraensis KOD1
  misc_feature (321437)..(321437): n is a or c or g or t.
  misc_feature (527833)..(527833): n is a or c or g or t.
  misc_feature (527901)..(527901): n is a or c or g or t.
  misc_feature (527978)..(527978): n is a or c or g or t.
  misc_feature (960838)..(960839): n is a or c or g or t.
  misc_feature (960860)..(960861): n is a or c or g or t.
  misc_feature (960872)..(960873): n is a or c or g or t.
  misc_feature (960879)..(960879): n is a or c or g or t.
  misc_feature (960890)..(960890): n is a or c or g or t.
  misc_feature (1250239)..(1250239): n is a or c or g or t.
  misc_feature (1302432)..(1302434): n is a or c or g or t.
  misc_feature (1302471)..(1302471): n is a or c or g or t.
  misc_feature (1302488)..(1302488): n is a or c or g or t.
  misc_feature (1674836)..(1674836): n is a or c or g or t.
MRIYVLGAGSIGSLFGALLARAGNDVTLIGRREQVDAINKNGLHVFGAEEFTVKPKATIYAPEEPPDLLILAVKSYSTKTALECARQCIGRNTWVLSIQNGLGNEELALKYTPNVMGGVTTNGAMLVEWGKVLWAGKGITVIGRYPTGRDDFVDEVASVFNEAGIDTSVTENAIGWKWAKAIVNSVINGLGTVLEVKNGHLKDDPHLEGISVDIAREGCMVAQQLGIEFEIHPLELLWDTIERTRENYNSTLQDIWRGRETEVDYIHGKIVEYARSVGMEAPRNELLWVLVKAKERINRGKTRNISEGC

SEQ ID NO: 1524 - protein, 224 aa, Thermococcus kodakaraensis KOD1
  misc_feature (321437)..(321437): n is a or c or g or t.
  misc_feature (527833)..(527833): n is a or c or g or t.
  misc_feature (527901)..(527901): n is a or c or g or t.
  misc_feature (527978)..(527978): n is a or c or g or t.
  misc_feature (960838)..(960839): n is a or c or g or t.
  misc_feature (960860)..(960861): n is a or c or g or t.
  misc_feature (960872)..(960873): n is a or c or g or t.
  misc_feature (960879)..(960879): n is a or c or g or t.
  misc_feature (960890)..(960890): n is a or c or g or t.
  misc_feature (1250239)..(1250239): n is a or c or g or t.
  misc_feature (1302432)..(1302434): n is a or c or g or t.
  misc_feature (1302471)..(1302471): n is a or c or g or t.
  misc_feature (1302488)..(1302488): n is a or c or g or t.
  misc_feature (1674836)..(1674836): n is a or c or g or t.
VWPRRYGRRADNHSKDGFINLTVKFSSGGSMGLLEDKALVEAALFVAGRPLSLKELSKALGIKSLEYLEKLIELIAAEYAERKSAIEVVRVLEDKYVMQVKQEYSQRVIHLMPKPDLRTGELKTLALIAYLQPVEQSKIIKLRGSQAYEHIKRLVEMGLVYAEPYERTKLLGTTKKFAELYGFPENDPVLIKEAFKKVVNAEYSDLMAKLEGKGEEKEEEAPSD

SEQ ID NO: 1525 - protein, 42 aa, Thermococcus kodakaraensis KOD1
  misc_feature (321437)..(321437): n is a or c or g or t.
  misc_feature (527833)..(527833): n is a or c or g or t.
  misc_feature (527901)..(527901): n is a or c or g or t.
  misc_feature (527978)..(527978): n is a or c or g or t.
  misc_feature (960838)..(960839): n is a or c or g or t.
  misc_feature (960860)..(960861): n is a or c or g or t.
  misc_feature (960872)..(960873): n is a or c or g or t.
  misc_feature (960879)..(960879): n is a or c or g or t.
  misc_feature (960890)..(960890): n is a or c or g or t.
  misc_feature (1250239)..(1250239): n is a or c or g or t.
  misc_feature (1302432)..(1302434): n is a or c or g or t.
  misc_feature (1302471)..(1302471): n is a or c or g or t.
  misc_feature (1302488)..(1302488): n is a or c or g or t.
  misc_feature (1674836)..(1674836): n is a or c or g or t.
VWIFGFYPYSTLIISLLWTLLVFKVGIKLGARKFLRIVQEEE

SEQ ID NO: 1526 - protein, 218 aa, Thermococcus kodakaraensis KOD1
  misc_feature (321437)..(321437): n is a or c or g or t.
  misc_feature (527833)..(527833): n is a or c or g or t.
  misc_feature (527901)..(527901): n is a or c or g or t.
  misc_feature (527978)..(527978): n is a or c or g or t.
  misc_feature (960838)..(960839): n is a or c or g or t.
  misc_feature (960860)..(960861): n is a or c or g or t.
  misc_feature (960872)..(960873): n is a or c or g or t.
  misc_feature (960879)..(960879): n is a or c or g or t.
  misc_feature (960890)..(960890): n is a or c or g or t.
  misc_feature (1250239)..(1250239): n is a or c or g or t.
  misc_feature (1302432)..(1302434): n is a or c or g or t.
  misc_feature (1302471)..(1302471): n is a or c or g or t.
  misc_feature (1302488)..(1302488): n is a or c or g or t.
  misc_feature (1674836)..(1674836): n is a or c or g or t.
MSLTDAYRDLRYLLNRGYPKKSALKFVADHYRLSLRDRYLLARCVFSDAWIAEVRRKLLKPGELEGKVLAVDGFNVLITLESVLDGEAILCEDGLVRDLKYQGKYRLNERTREVVEIVVESLSRLKVSKAIFFYGKNVPKSGIVRKITEEAIEKYGLSGDVRLVKSPDFELKAFSIVATADVGIISRVEHVFDVPLHVSGRLGVEIRNIFDIFQVEKR

SEQ ID NO: 1527 - protein, 232 aa, Thermococcus kodakaraensis KOD1
  misc_feature (321437)..(321437): n is a or c or g or t.
  misc_feature (527833)..(527833): n is a or c or g or t.
  misc_feature (527901)..(527901): n is a or c or g or t.
  misc_feature (527978)..(527978): n is a or c or g or t.
  misc_feature (960838)..(960839): n is a or c or g or t.
  misc_feature (960860)..(960861): n is a or c or g or t.
  misc_feature (960872)..(960873): n is a or c or g or t.
  misc_feature (960879)..(960879): n is a or c or g or t.
  misc_feature (960890)..(960890): n is a or c or g or t.
  misc_feature (1250239)..(1250239): n is a or c or g or t.
  misc_feature (1302432)..(1302434): n is a or c or g or t.
  misc_feature (1302471)..(1302471): n is a or c or g or t.
  misc_feature (1302488)..(1302488): n is a or c or g or t.
  misc_feature (1674836)..(1674836): n is a or c or g or t.
MWSSPRRAKAYILSFPFSSMFGEHELRTQFIKIADKKIHLLEDKGGIVRYRRDDFEVIIKNNGEKLKVLPAPALGYGVKLLMIKFRDPLVIPPKDAVAGFVEAPIEVDVKIGDLTIDHFILGKEKYALYGAIEAGVICRYQVSPFYTEEPESIGVAKLIVSNPSSEWKPLERVVVPIKGTSMYYENTKAYYPLLLVTLKNHSPEVNNTGRPPKEGLNAVGKGLSLPNFLMRW

SEQ ID NO: 1528 - protein, 375 aa, Thermococcus kodakaraensis KOD1
  misc_feature (321437)..(321437): n is a or c or g or t.
  misc_feature (527833)..(527833): n is a or c or g or t.
  misc_feature (527901)..(527901): n is a or c or g or t.
  misc_feature (527978)..(527978): n is a or c or g or t.
  misc_feature (960838)..(960839): n is a or c or g or t.
  misc_feature (960860)..(960861): n is a or c or g or t.
  misc_feature (960872)..(960873): n is a or c or g or t.
  misc_feature (960879)..(960879): n is a or c or g or t.
  misc_feature (960890)..(960890): n is a or c or g or t.
  misc_feature (1250239)..(1250239): n is a or c or g or t.
  misc_feature (1302432)..(1302434): n is a or c or g or t.
  misc_feature (1302471)..(1302471): n is a or c or g or t.
  misc_feature (1302488)..(1302488): n is a or c or g or t.
  misc_feature (1674836)..(1674836): n is a or c or g or t.
MQKQHAVGNMRKHAGLHIRRRVLSLFVVFLAISTLSIVVSSRPYWATPGTYFEYTARGDRAVIIECHNGTLYFGTYGVLRWEILDVARDQIELKAQLRVYNLTMHYQRALNAEEGLIKARELIEMYSSLNFTQSGPCRVAEVQAGRVKVCERADGVLIAIEETNQTYWLYAGDNGATEGLFSNATIPNLSRSITFNVSLTDNSVLHNGKRLGMNTLFLTDLDVAGRTIMNGWFINEVRELNATVHTRFGAFKPPIVLVTTNFYGNSSNFALYDPGSGVLIEGYTPVSPIWELFGFKRVLFSDREHFNRTDDPIIKSKDIYGFGMVLEDTNAFYSETGMLENVQIPLDAIAVFVLAITVFLVIGYERAKTRRMGKQ

SEQ ID NO: 1529 - protein, 448 aa, Thermococcus kodakaraensis KOD1
  misc_feature (321437)..(321437): n is a or c or g or t.
  misc_feature (527833)..(527833): n is a or c or g or t.
  misc_feature (527901)..(527901): n is a or c or g or t.
  misc_feature (527978)..(527978): n is a or c or g or t.
  misc_feature (960838)..(960839): n is a or c or g or t.
  misc_feature (960860)..(960861): n is a or c or g or t.
  misc_feature (960872)..(960873): n is a or c or g or t.
  misc_feature (960879)..(960879): n is a or c or g or t.
  misc_feature (960890)..(960890): n is a or c or g or t.
  misc_feature (1250239)..(1250239): n is a or c or g or t.
  misc_feature (1302432)..(1302434): n is a or c or g or t.
  misc_feature (1302471)..(1302471): n is a or c or g or t.
  misc_feature (1302488)..(1302488): n is a or c or g or t.
  misc_feature (1674836)..(1674836): n is a or c or g or t.
MELIPTGIPSLDKALNGGFSRGSTILLAGNPGSGKTHLAIHVLYNNMRRGLKGVYVSFAETKKQFYRNALQSGIDLSKMEGVNLFRFYDMLTVPKDELEGMIAFLIDDIVEFKPDIIVFDSVTVFGQMFGEEYLRSFLHSIIGRLVNAFDALAILIDEIPYGEKRVGFGLEEFVVDGVIVLELERMGEVIRRYLTIPKMRGRPLKRAAYEYVITDRGLEVLAIPELEFTESEAPKSRLKTGILGLDELLGGGLYEGSITLIAGPTGSGKTILALNLASNLSKSGKKVLYIAYEESLAALRDTLEKLGLEENFRIVSMVPEGRTPVEYYALIKDLIEKEGFDVLVIDSLSAMESHMDEKEFIKAVRYLQLLTKEKGVTFVLTYITGSTYKLATTGFSTLVDNLIFLTYDVPERVGESLKRHILVLKARRSRNDPTLKDFTIGEGGIRIE

SEQ ID NO: 1530 - protein, 116 aa, Thermococcus kodakaraensis KOD1
  misc_feature (321437)..(321437): n is a or c or g or t.
  misc_feature (527833)..(527833): n is a or c or g or t.
  misc_feature (527901)..(527901): n is a or c or g or t.
  misc_feature (527978)..(527978): n is a or c or g or t.
  misc_feature (960838)..(960839): n is a or c or g or t.
  misc_feature (960860)..(960861): n is a or c or g or t.
  misc_feature (960872)..(960873): n is a or c or g or t.
  misc_feature (960879)..(960879): n is a or c or g or t.
  misc_feature (960890)..(960890): n is a or c or g or t.
  misc_feature (1250239)..(1250239): n is a or c or g or t.
  misc_feature (1302432)..(1302434): n is a or c or g or t.
  misc_feature (1302471)..(1302471): n is a or c or g or t.
  misc_feature (1302488)..(1302488): n is a or c or g or t.
  misc_feature (1674836)..(1674836): n is a or c or g or t.
VMGMETVEGIMVVTTETIPGYRIVEVKGIARGGIVKATHIGRDIMAVLRNIKGGEVREYTQMMAEAREEALRRMALHAKELGANAVVNVRFATSNVGSSVAEVYAYGTAVVVEKEE

SEQ ID NO: 1531 - protein, 263 aa, Thermococcus kodakaraensis KOD1
  misc_feature (321437)..(321437): n is a or c or g or t.
  misc_feature (527833)..(527833): n is a or c or g or t.
  misc_feature (527901)..(527901): n is a or c or g or t.
  misc_feature (527978)..(527978): n is a or c or g or t.
  misc_feature (960838)..(960839): n is a or c or g or t.
  misc_feature (960860)..(960861): n is a or c or g or t.
  misc_feature (960872)..(960873): n is a or c or g or t.
  misc_feature (960879)..(960879): n is a or c or g or t.
  misc_feature (960890)..(960890): n is a or c or g or t.
  misc_feature (1250239)..(1250239): n is a or c or g or t.
  misc_feature (1302432)..(1302434): n is a or c or g or t.
  misc_feature (1302471)..(1302471): n is a or c or g or t.
  misc_feature (1302488)..(1302488): n is a or c or g or t.
  misc_feature (1674836)..(1674836): n is a or c or g or t.
MSLEELYRYLNWRMNPADERARERFERIREFFESVSDKLPKGGRVLDICAGTGVAGVALAKATGAKLLTVLDARKDDLELAKEWLKIADINPELNLVQGDAREVAKLVGEHDVAVLWGYTMPHFDPFDAVRLFANVASILSGEGVFIIEDMDRVYWILYRAGYKKFLIEGRRENYTIASMHEGYDFVRGTFKRGYYILPGFKKISDVDFHYWDLATQLAIGSVFFKEAELITQEEHEKKVGDILLFRKPRKEIAGKILEDYNV

SEQ ID NO: 1532 - protein, 40 aa, Thermococcus kodakaraensis KOD1
  misc_feature (321437)..(321437): n is a or c or g or t.
  misc_feature (527833)..(527833): n is a or c or g or t.
  misc_feature (527901)..(527901): n is a or c or g or t.
  misc_feature (527978)..(527978): n is a or c or g or t.
  misc_feature (960838)..(960839): n is a or c or g or t.
  misc_feature (960860)..(960861): n is a or c or g or t.
  misc_feature (960872)..(960873): n is a or c or g or t.
  misc_feature (960879)..(960879): n is a or c or g or t.
  misc_feature (960890)..(960890): n is a or c or g or t.
  misc_feature (1250239)..(1250239): n is a or c or g or t.
  misc_feature (1302432)..(1302434): n is a or c or g or t.
  misc_feature (1302471)..(1302471): n is a or c or g or t.
  misc_feature (1302488)..(1302488): n is a or c or g or t.
  misc_feature (1674836)..(1674836): n is a or c or g or t.
VTIMKRRPRKWKKKGRMRWKWIKKRIRRLKRQRRKERGLI

SEQ ID NO: 1533 - protein, 216 aa, Thermococcus kodakaraensis KOD1
  misc_feature (321437)..(321437): n is a or c or g or t.
  misc_feature (527833)..(527833): n is a or c or g or t.
  misc_feature (527901)..(527901): n is a or c or g or t.
  misc_feature (527978)..(527978): n is a or c or g or t.
  misc_feature (960838)..(960839): n is a or c or g or t.
  misc_feature (960860)..(960861): n is a or c or g or t.
  misc_feature (960872)..(960873): n is a or c or g or t.
  misc_feature (960879)..(960879): n is a or c or g or t.
  misc_feature (960890)..(960890): n is a or c or g or t.
  misc_feature (1250239)..(1250239): n is a or c or g or t.
  misc_feature (1302432)..(1302434): n is a or c or g or t.
  misc_feature (1302471)..(1302471): n is a or c or g or t.
  misc_feature (1302488)..(1302488): n is a or c or g or t.
  misc_feature (1674836)..(1674836): n is a or c or g or t.
MSLFSELQLLSLELETSRGKALVFADPHIGFELSRGLRIRTDFEEVLAQFVLESNPNLLIILGDLKEPLGLSFRLKEMLLRFFSPLKDTEVVITKGNHDGRIEEIARKFENVSVVEKFILDQKLFLHGHTKLPKGEFREVFLGHAHPAYTFKSGGVAKKVKVFVRAEKFLVLPTINPYIEGFDIREGLKLVPFLKDVSEVEIFLPEGVYVRKVKVY

SEQ ID NO: 1534 - protein, 111 aa, Thermococcus kodakaraensis KOD1
  misc_feature (321437)..(321437): n is a or c or g or t.
  misc_feature (527833)..(527833): n is a or c or g or t.
  misc_feature (527901)..(527901): n is a or c or g or t.
  misc_feature (527978)..(527978): n is a or c or g or t.
  misc_feature (960838)..(960839): n is a or c or g or t.
  misc_feature (960860)..(960861): n is a or c or g or t.
  misc_feature (960872)..(960873): n is a or c or g or t.
  misc_feature (960879)..(960879): n is a or c or g or t.
  misc_feature (960890)..(960890): n is a or c or g or t.
  misc_feature (1250239)..(1250239): n is a or c or g or t.
  misc_feature (1302432)..(1302434): n is a or c or g or t.
  misc_feature (1302471)..(1302471): n is a or c or g or t.
  misc_feature (1302488)..(1302488): n is a or c or g or t.
  misc_feature (1674836)..(1674836): n is a or c or g or t.
VMGDVYERLEALLKSLGVKKTELRIYRLLLEKKRPMRVTEIVNELGISERSVREHVLSLYRKGMLRRELIQQGWLGYTYTAVSPHELLARIKQNILEKINEIEMELREAKN

SEQ ID NO: 1535 - protein, 210 aa, Thermococcus kodakaraensis KOD1
  misc_feature (321437)..(321437): n is a or c or g or t.
  misc_feature (527833)..(527833): n is a or c or g or t.
  misc_feature (527901)..(527901): n is a or c or g or t.
  misc_feature (527978)..(527978): n is a or c or g or t.
  misc_feature (960838)..(960839): n is a or c or g or t.
  misc_feature (960860)..(960861): n is a or c or g or t.
  misc_feature (960872)..(960873): n is a or c or g or t.
  misc_feature (960879)..(960879): n is a or c or g or t.
  misc_feature (960890)..(960890): n is a or c or g or t.
  misc_feature (1250239)..(1250239): n is a or c or g or t.
  misc_feature (1302432)..(1302434): n is a or c or g or t.
  misc_feature (1302471)..(1302471): n is a or c or g or t.
  misc_feature (1302488)..(1302488): n is a or c or g or t.
  misc_feature (1674836)..(1674836): n is a or c or g or t.
VASFVDEILSAMGRGEVPHRPVVVVFPNEEERRKVELPEEVEVLIGDPINKETLERARVESASHVVLALDDDSKSVFVTLRVKSISGAKVFVEALSADSIDLLKQAGADRVILSRGLAGRLLASAVIEPEVVDVIDDITSSLGGYDITVVELPEVWGVKYSEALELVQRKYNLYVMGYYTNRPVLVPRLDSPVPEGSKLIVLREVGDNGI

SEQ ID NO: 1536 - protein, 252 aa, Thermococcus kodakaraensis KOD1
  misc_feature (321437)..(321437): n is a or c or g or t.
  misc_feature (527833)..(527833): n is a or c or g or t.
  misc_feature (527901)..(527901): n is a or c or g or t.
  misc_feature (527978)..(527978): n is a or c or g or t.
  misc_feature (960838)..(960839): n is a or c or g or t.
  misc_feature (960860)..(960861): n is a or c or g or t.
  misc_feature (960872)..(960873): n is a or c or g or t.
  misc_feature (960879)..(960879): n is a or c or g or t.
  misc_feature (960890)..(960890): n is a or c or g or t.
  misc_feature (1250239)..(1250239): n is a or c or g or t.
  misc_feature (1302432)..(1302434): n is a or c or g or t.
  misc_feature (1302471)..(1302471): n is a or c or g or t.
  misc_feature (1302488)..(1302488): n is a or c or g or t.
  misc_feature (1674836)..(1674836): n is a or c or g or t.
MSKDKVTVITSPSTEELVSLVNSALLEEAMLTIFARCKVHYDGRAKSELGSGDRVIIVKPDGSFLIHQSKKREPVNWQPPGSRVRLELRENPVLVSIRRKPRETLEVELEEVYMVSVFRAEDYEELALTGSEAEMAELIFENPEVIEPGFKPLFREKAIGTGIVDVLGRDSDGNIVVLELKRRRAELHAVRQLKSYVEILREEYGDKVRGILVAPSLTSGAKRLLEKEGLEFRKLEPPKRDSKKKGRQKTLF

SEQ ID NO: 1537 - protein, 483 aa, Thermococcus kodakaraensis KOD1
  misc_feature (321437)..(321437): n is a or c or g or t.
  misc_feature (527833)..(527833): n is a or c or g or t.
  misc_feature (527901)..(527901): n is a or c or g or t.
  misc_feature (527978)..(527978): n is a or c or g or t.
  misc_feature (960838)..(960839): n is a or c or g or t.
  misc_feature (960860)..(960861): n is a or c or g or t.
  misc_feature (960872)..(960873): n is a or c or g or t.
  misc_feature (960879)..(960879): n is a or c or g or t.
  misc_feature (960890)..(960890): n is a or c or g or t.
  misc_feature (1250239)..(1250239): n is a or c or g or t.
  misc_feature (1302432)..(1302434): n is a or c or g or t.
  misc_feature (1302471)..(1302471): n is a or c or g or t.
  misc_feature (1302488)..(1302488): n is a or c or g or t.
  misc_feature (1674836)..(1674836): n is a or c or g or t.
VVRMRIEDVYIWDINAKWLGISPVQLMENAGAGVARTIEERFGKGLKVAVFSGTGNNGGDGFVATRHLSFENDVTLFLVGDEAKIRSEEAKHNWEILKKLDFVKIRILKDSSYIKSLDLSEFDVIVDALLGAGTKGEPREPIRSAIEKINEYSGKAKIVSVDLPSGYPSDIRVKCDFAVTFQWDKEEYGGFERVIVKIGYPKELYHLVGPGDAKFALRKKGEHKGQNGKLLVIGGSEDYFGAPYLAAKAASYLVDLVYLAMPEYSARRINDPNVILRPFERRNFRKEDVEDVLAIADGVDAVVIGPGIGQRAETKEFVVEFLRWCEKPVVIDADALKAVAEDLDVLKGKNFVLTPHAGEFRILFGEKPEGSLEEKAKLVVEKAKGVGGTVLLKGAYDIISDGKGWKYNKTGNRGMTTGGTGDVLAGLVGALLALGNSPLRAASAGAFLNGLAGDMVKEEMGENFTALDVAEKVPQAVKWVLEF

SEQ ID NO: 1538 - protein, 207 aa, Thermococcus kodakaraensis KOD1
  misc_feature (321437)..(321437): n is a or c or g or t.
  misc_feature (527833)..(527833): n is a or c or g or t.
  misc_feature (527901)..(527901): n is a or c or g or t.
  misc_feature (527978)..(527978): n is a or c or g or t.
  misc_feature (960838)..(960839): n is a or c or g or t.
  misc_feature (960860)..(960861): n is a or c or g or t.
  misc_feature (960872)..(960873): n is a or c or g or t.
  misc_feature (960879)..(960879): n is a or c or g or t.
  misc_feature (960890)..(960890): n is a or c or g or t.
  misc_feature (1250239)..(1250239): n is a or c or g or t.
  misc_feature (1302432)..(1302434): n is a or c or g or t.
  misc_feature (1302471)..(1302471): n is a or c or g or t.
  misc_feature (1302488)..(1302488): n is a or c or g or t.
  misc_feature (1674836)..(1674836): n is a or c or g or t.
MKRVVGLFLFLVLTSVVVFTFLLDSSEKYPARFHAEFQRPVEFNGAGLLKGYPNAVTHVAVFRFKESPAGKNVWELEEVFDVAPDYVIAEIQDGSTLFCRAESQNDTFVFRRENCYKTLDDALTRRITLTGCLNAIYIGYSLERNAILIFKFRTANETTCVNETVEVRGRLYDVLVRIETGNGTVEIPVERVTGNYLTDEVYEIQKE

SEQ ID NO: 1539 - protein, 455 aa, Thermococcus kodakaraensis KOD1
  misc_feature (321437)..(321437): n is a or c or g or t.
  misc_feature (527833)..(527833): n is a or c or g or t.
  misc_feature (527901)..(527901): n is a or c or g or t.
  misc_feature (527978)..(527978): n is a or c or g or t.
  misc_feature (960838)..(960839): n is a or c or g or t.
  misc_feature (960860)..(960861): n is a or c or g or t.
  misc_feature (960872)..(960873): n is a or c or g or t.
  misc_feature (960879)..(960879): n is a or c or g or t.
  misc_feature (960890)..(960890): n is a or c or g or t.
  misc_feature (1250239)..(1250239): n is a or c or g or t.
  misc_feature (1302432)..(1302434): n is a or c or g or t.
  misc_feature (1302471)..(1302471): n is a or c or g or t.
  misc_feature (1302488)..(1302488): n is a or c or g or t.
  misc_feature (1674836)..(1674836): n is a or c or g or t.
MIIMSEQFVNRAEELKALRGAYESNRKELIIVYGRRRVGKTALVKKSVEDIPHIYFFAEETLESENLRTFKSLVAKALGNPLVEKAELSWEELFELLDGSGVVVIIDEFPNLLKANRGLVSKFQKIWDSAKGLKLVLTGSAISVMESHVLGYKSPLYGRRTLSIMLKPLSFLHLRDFFPEKSWEELVRIYGITDGIPAYLREVQFRLNAGESLEEVFQPNKPLFDEAEFLLRSELREPARYFAILKAIAFGKTKFGEIVSFTGLPGSTVSKYLSNLQTLHIVEERHPVGEPERKRNARYYLSDLYFNFWFRFIYPNRSQLLDFGYIENFEEEYNRYLGFVFEKVSADFLREMNKAGRLPFRFTKIGKWWRKGEEIDLVALNEREKKALFVEVKWKDLSEREVRGILKDLERKVELVSLEGWEKHYGLIAKSVEGKEGLREDCWLVWDLGDFETST

SEQ ID NO: 1540 - protein, 384 aa, Thermococcus kodakaraensis KOD1
  misc_feature (321437)..(321437): n is a or c or g or t.
  misc_feature (527833)..(527833): n is a or c or g or t.
  misc_feature (527901)..(527901): n is a or c or g or t.
  misc_feature (527978)..(527978): n is a or c or g or t.
  misc_feature (960838)..(960839): n is a or c or g or t.
  misc_feature (960860)..(960861): n is a or c or g or t.
  misc_feature (960872)..(960873): n is a or c or g or t.
  misc_feature (960879)..(960879): n is a or c or g or t.
  misc_feature (960890)..(960890): n is a or c or g or t.
  misc_feature (1250239)..(1250239): n is a or c or g or t.
  misc_feature (1302432)..(1302434): n is a or c or g or t.
  misc_feature (1302471)..(1302471): n is a or c or g or t.
  misc_feature (1302488)..(1302488): n is a or c or g or t.
  misc_feature (1674836)..(1674836): n is a or c or g or t.
MDDFKVTPWDVEGVVDYNKLIEQFGTSPLTDELIEKTAELTKSELPLFFRRRFFFSHRDYDKVLADYESGRGFFLYTGRGPSGPMHIGHIIPFFATKWLQENFDVNLYIQITDDEKFLFKEKLSFEDTKRWAYENILDIIAVGFDPDKTFIFQNSEFTKIYEMALPIAKKINFSMARAVFGFNEQSKIGMIFYPAIQAAPTFFEKKRCLIPAAIDQDPYWRLQRDFAESLGYYKTAAIHSKFVPGLTSLEGKMSASKPETAVYLTDDPEEAGKKIWKFALTGGQPTLKEQREKGGNPEKCVVFKWFEIFFEPDDEKLMERYRACKAGELTCGQCKRELIERVQKFLKEHQKKRKEAEKKVEKFKYTGELAQEQWDKAIPEPLRT

SEQ ID NO: 1541 - protein, 127 aa, Thermococcus kodakaraensis KOD1
  misc_feature (321437)..(321437): n is a or c or g or t.
  misc_feature (527833)..(527833): n is a or c or g or t.
  misc_feature (527901)..(527901): n is a or c or g or t.
  misc_feature (527978)..(527978): n is a or c or g or t.
  misc_feature (960838)..(960839): n is a or c or g or t.
  misc_feature (960860)..(960861): n is a or c or g or t.
  misc_feature (960872)..(960873): n is a or c or g or t.
  misc_feature (960879)..(960879): n is a or c or g or t.
  misc_feature (960890)..(960890): n is a or c or g or t.
  misc_feature (1250239)..(1250239): n is a or c or g or t.
  misc_feature (1302432)..(1302434): n is a or c or g or t.
  misc_feature (1302471)..(1302471): n is a or c or g or t.
  misc_feature (1302488)..(1302488): n is a or c or g or t.
  misc_feature (1674836)..(1674836): n is a or c or g or t.
MFLVALLTFGKLAKTIRLIVIKEKANEYVKAAVSMGAGALWVLRKHILPPVGEFSLRYSTMLLAKVVALISVFGFFGLIPGTNWGSFMIEAMSQGALYGGYWWWVVAPGLAMGFLSAGLALVFFDVG

SEQ ID NO: 1542 - protein, 651 aa, Thermococcus kodakaraensis KOD1
  misc_feature (321437)..(321437): n is a or c or g or t.
  misc_feature (527833)..(527833): n is a or c or g or t.
  misc_feature (527901)..(527901): n is a or c or g or t.
  misc_feature (527978)..(527978): n is a or c or g or t.
  misc_feature (960838)..(960839): n is a or c or g or t.
  misc_feature (960860)..(960861): n is a or c or g or t.
  misc_feature (960872)..(960873): n is a or c or g or t.
  misc_feature (960879)..(960879): n is a or c or g or t.
  misc_feature (960890)..(960890): n is a or c or g or t.
  misc_feature (1250239)..(1250239): n is a or c or g or t.
  misc_feature (1302432)..(1302434): n is a or c or g or t.
  misc_feature (1302471)..(1302471): n is a or c or g or t.
  misc_feature (1302488)..(1302488): n is a or c or g or t.
  misc_feature (1674836)..(1674836): n is a or c or g or t.
VRSMPSKTAVAKLKREKKKAVVVFIIFVFLSLGINFTLGGIGAFMGTVDEFSHIGNVEFVVQGVGVENLTRFGEVVNYLYFDEGKVKLNGKYYTALIGYGRFDVPNAKSTPDGAYVLAFPEARRGDKIEVNGKTYTVLGSYYYLMGKPIVLTMEKGENLYAFMRCNDTKALAEFLMSHARVRYFMVYENGHTPYMDELGNVKNFVMSFFYLLLGTALLIEVLVTVAHLRGSTREVGTLKALGLPDSFIFTLFAGDYLIVALLGYAIGIVPGILLGSRSSLFGVSIPLRPNYAYPFKFDVLITMAIVLMVSLPYLYVSRIRTIEALRFVPKRSSLLKFLAVFFVAFLASSSAYFALAGVEKLASLNAPFNVWVIGTPEKMAKLPGEKVGYLSGQSVNGITTEIYFFNRTSMFEKTLIEGRWFKGQDEAVIEVGLARKLHLNVGDTVRVNLLGVERTYRVVGISDAFFYNYRALFLPMEGFVEPRMSFMKAENPEEVKEELESQGFKVYTLDDLRRNIEQNLILFKTPVYALMLVTFLLSVFAIFTLIYLEIEGNEKVYATLKAVGIPDSHVEREFLTKVVTSAVIGSLLAIPPAVRLGYYIGNIILPVNVSLGDALQILPLLPVLYAAYALFTVLVVRRVMGKLDVVKALRA

SEQ ID NO: 1543 - protein, 484 aa, Thermococcus kodakaraensis KOD1
  misc_feature (321437)..(321437): n is a or c or g or t.
  misc_feature (527833)..(527833): n is a or c or g or t.
  misc_feature (527901)..(527901): n is a or c or g or t.
  misc_feature (527978)..(527978): n is a or c or g or t.
  misc_feature (960838)..(960839): n is a or c or g or t.
  misc_feature (960860)..(960861): n is a or c or g or t.
  misc_feature (960872)..(960873): n is a or c or g or t.
  misc_feature (960879)..(960879): n is a or c or g or t.
  misc_feature (960890)..(960890): n is a or c or g or t.
  misc_feature (1250239)..(1250239): n is a or c or g or t.
  misc_feature (1302432)..(1302434): n is a or c or g or t.
  misc_feature (1302471)..(1302471): n is a or c or g or t.
  misc_feature (1302488)..(1302488): n is a or c or g or t.
  misc_feature (1674836)..(1674836): n is a or c or g or t.
VVLNMAEDIEAKIRRLRELGRMTTESEAPSPAAPPKTSPSKKPSRRPRSLSSIRQKERRKRILIGASILIIIILLISVGVYSYIQSSRESKLENTRAEKISELNRYFASYNFSNSNCSQKAFQYKGLALSKITSANSLEELNSIDVRTYFDQAVTAYEQCIQEIKQREYEKQLNQTKQQKIQEIEVAFQPLLSLGLPDTLRTKAVATMKSLEEQVQSATTIEQVESIKPDSYLLSLWKKYYLLELDKIPGQDVILERNGEKSLISKDQAKALISMVDNYQDLIGYKVSPVEWVEISLVLQRKDMNGALFDPGDRVKLYLKGENTTVVDGYLELLLLPVGEGGSISVSESQSQSSSTSTSSSTSYSESHSTSESPGGASISDSSSASDSYSNSQSGSQSSSASYSYSVNLAEILKAIAAGKIQASDEVKAQLQNYGWELLNLEKNTGLQSMPETTKIMVIVKVPSIFVPDILENENAITIAKVIT

SEQ ID NO: 1544 - protein, 106 aa, Thermococcus kodakaraensis KOD1
  misc_feature (321437)..(321437): n is a or c or g or t.
  misc_feature (527833)..(527833): n is a or c or g or t.
  misc_feature (527901)..(527901): n is a or c or g or t.
  misc_feature (527978)..(527978): n is a or c or g or t.
  misc_feature (960838)..(960839): n is a or c or g or t.
  misc_feature (960860)..(960861): n is a or c or g or t.
  misc_feature (960872)..(960873): n is a or c or g or t.
  misc_feature (960879)..(960879): n is a or c or g or t.
  misc_feature (960890)..(960890): n is a or c or g or t.
  misc_feature (1250239)..(1250239): n is a or c or g or t.
  misc_feature (1302432)..(1302434): n is a or c or g or t.
  misc_feature (1302471)..(1302471): n is a or c or g or t.
  misc_feature (1302488)..(1302488): n is a or c or g or t.
  misc_feature (1674836)..(1674836): n is a or c or g or t.
VTVPVLFSDGEISNLNPNPTMTYDEYKDMLYEYSGFQRKVGESTQVVNASTNLFQLTPKLLTGVQVSVPTVEAKTRENYELPIWIVYSTGGSVEISYDVKWSEGGG

SEQ ID NO: 1545 - protein, 1144 aa, Thermococcus kodakaraensis KOD1
  misc_feature (321437)..(321437): n is a or c or g or t.
  misc_feature (527833)..(527833): n is a or c or g or t.
  misc_feature (527901)..(527901): n is a or c or g or t.
  misc_feature (527978)..(527978): n is a or c or g or t.
  misc_feature (960838)..(960839): n is a or c or g or t.
  misc_feature (960860)..(960861): n is a or c or g or t.
  misc_feature (960872)..(960873): n is a or c or g or t.
  misc_feature (960879)..(960879): n is a or c or g or t.
  misc_feature (960890)..(960890): n is a or c or g or t.
  misc_feature (1250239)..(1250239): n is a or c or g or t.
  misc_feature (1302432)..(1302434): n is a or c or g or t.
  misc_feature (1302471)..(1302471): n is a or c or g or t.
  misc_feature (1302488)..(1302488): n is a or c or g or t.
  misc_feature (1674836)..(1674836): n is a or c or g or t.
VGSLEDILSGSTSEKRESRPTSETGADLLSQLLGGEEKPQKSMKEKTAEREKREPLPQSKPEPASTIPSATGATGADFLSELLGGSSGSATSQPVQTSPSKPVSNARSIFSESLREESSYAGRAQVLDAYGNVRILKVKGEPVPIYEIRLPKLSREEEQLFRRIKDRAITEIQIDPTAIPDPEERRKVFMNAVKRMIKEEAPHYSEGRIEVLADMIVQQMIGYGKLDPLVRDDNLEEIMVIGTNRPVYVWHRRFNMCKTNVIFDSDRDILNIIERIAREVGRRIDQQSPLLDARLPDGSRVNATIPPISLDGPTITIRKFKRDPLTIIDLIKYGTMSSEVAAFLWVLVDGLGVKPANVLVAGGTGSGKTTTLNSLGMFIPPSERVISIEDTAELQLPVEHWVRLETRPPNLEGKGEVTMDDLVRNTLRMRPDRIIVGEVRGPEARTMFTAMNTGHNGALYDFSVIQLSNGKFVLIGDVVEELFNKYSDRIKTYKDLEYIELDPEDQFEVVSVGPNLKAGKHTVTAVWRRKVRNGEKLIRIRTRTGNEVILTKTHPFFVFSDGDVVRKEAEKVRPGDRVAVMMRPPKAPQSPAVVPVEVYAGISDYYLVPNGNGMKKVPNRGVPPEDAEYLLSRNSKPVKLVREVGTSLAYVAGVILGDGYLSSDGYNLSVTFDDPDYMNSFTSAMSEFLPESAPRIKDNGTSTVVTYGSRIFNEMLSRIFGIPRGKKSSIWDVPDVVLTNDDLMRYFIAGLFDADGSVDETGPAVILTTKSESAARKIWYALQRLGIISTVSRVRNRGFKEGHIFRVIISSVEDLKKFDALIPLSHSRKREKLKAILKEKRPYRGRYTYRVPISPEMIKPLRTRLNLTVAELSKLASKYAGETITESLIRHVEKGRTSEIRRSALKGIALALQRIAQDIGDEDAWVMAKRLELIADGDVYWDRVVEVEEVDPEEIGIEYLYDLTVDEDHNYVANGILLSNCMGTIHANSARETIVRLESPPMSVPRIMIPALDIILMQVRFHSRKKGTIRRVTEIAEVSGLEGESIQLNTLYKYDPAKDELVPTGVPSRTVNILAQHTGMSVREIELEIEKRRLILEWMVEKGIRDIDKVGYYIRQFYIDEEWLLNKISAESDVETSKQIQALM

SEQ ID NO: 1546 - protein, 142 aa, Thermococcus kodakaraensis KOD1
  misc_feature (321437)..(321437): n is a or c or g or t.
  misc_feature (527833)..(527833): n is a or c or g or t.
  misc_feature (527901)..(527901): n is a or c or g or t.
  misc_feature (527978)..(527978): n is a or c or g or t.
  misc_feature (960838)..(960839): n is a or c or g or t.
  misc_feature (960860)..(960861): n is a or c or g or t.
  misc_feature (960872)..(960873): n is a or c or g or t.
  misc_feature (960879)..(960879): n is a or c or g or t.
  misc_feature (960890)..(960890): n is a or c or g or t.
  misc_feature (1250239)..(1250239): n is a or c or g or t.
  misc_feature (1302432)..(1302434): n is a or c or g or t.
  misc_feature (1302471)..(1302471): n is a or c or g or t.
  misc_feature (1302488)..(1302488): n is a or c or g or t.
  misc_feature (1674836)..(1674836): n is a or c or g or t.
VLYRSMMIVIEALERGAPMSDVLMYVANDVREILRIQQERKASTGMQIMFFTITSGFVGPLILGIVTQVMSSMSSPELGIMFPMDSMTTILMAFVVVQAVLSGLGMGIIREGKYSAGLKYSLMLTVMGLVVFKVATILKLSF

SEQ ID NO: 1547 - protein, 317 aa, Thermococcus kodakaraensis KOD1
  misc_feature (321437)..(321437): n is a or c or g or t.
  misc_feature (527833)..(527833): n is a or c or g or t.
  misc_feature (527901)..(527901): n is a or c or g or t.
  misc_feature (527978)..(527978): n is a or c or g or t.
  misc_feature (960838)..(960839): n is a or c or g or t.
  misc_feature (960860)..(960861): n is a or c or g or t.
  misc_feature (960872)..(960873): n is a or c or g or t.
  misc_feature (960879)..(960879): n is a or c or g or t.
  misc_feature (960890)..(960890): n is a or c or g or t.
  misc_feature (1250239)..(1250239): n is a or c or g or t.
  misc_feature (1302432)..(1302434): n is a or c or g or t.
  misc_feature (1302471)..(1302471): n is a or c or g or t.
  misc_feature (1302488)..(1302488): n is a or c or g or t.
  misc_feature (1674836)..(1674836): n is a or c or g or t.
MKIEEVHEKADLVLSEVGKVIVGKENVLKMILATILADGHVLIEDLPGLAKTLMAKSFAGALGLDFKRVQFTPDLLPSDIIGVSVFNQKTLEFEFRKGPVFTNILLADEVNRSPPKTQSALLEAMQERQVTVEGKTYPLPRPFVVIATQNPIEQEGTYPLPEAQLDRFLVRLHVGYPTKEEELEILRRRIGRKSDEVSVSPVVTAEEVLEMQRAVEDVYVSDPVLEYIVDIVEATRRDKKDVEVGASPRGSLALLKLARAYAAIEGRDYVIPDDVKAVAIPALSHRLILKRELWYTKVSQEKVMAKILERVPVPKFD

SEQ ID NO: 1548 - protein, 206 aa, Thermococcus kodakaraensis KOD1
  misc_feature (321437)..(321437): n is a or c or g or t.
  misc_feature (527833)..(527833): n is a or c or g or t.
  misc_feature (527901)..(527901): n is a or c or g or t.
  misc_feature (527978)..(527978): n is a or c or g or t.
  misc_feature (960838)..(960839): n is a or c or g or t.
  misc_feature (960860)..(960861): n is a or c or g or t.
  misc_feature (960872)..(960873): n is a or c or g or t.
  misc_feature (960879)..(960879): n is a or c or g or t.
  misc_feature (960890)..(960890): n is a or c or g or t.
  misc_feature (1250239)..(1250239): n is a or c or g or t.
  misc_feature (1302432)..(1302434): n is a or c or g or t.
  misc_feature (1302471)..(1302471): n is a or c or g or t.
  misc_feature (1302488)..(1302488): n is a or c or g or t.
  misc_feature (1674836)..(1674836): n is a or c or g or t.
VVYITRERAIIKGSIFVVFLGFLTAVINGRSDHIYRTIVAILGLSIPLVLPKKLLNPPEKVKPFLSPVYDERTMAVLGIFIAVHVSLVNVPFTHYDLFHRDWRNADMISHFLGGLTVWLIVAQILSELEGIGIKLSKRQVVLYTFIVFYVLSLGWEVAEKLSESEISFIHESLTNKLRDLLMDTLGALFGWWVVEKRRYPFGLGRD

SEQ ID NO: 1549 - protein, 354 aa, Thermococcus kodakaraensis KOD1
  misc_feature (321437)..(321437): n is a or c or g or t.
  misc_feature (527833)..(527833): n is a or c or g or t.
  misc_feature (527901)..(527901): n is a or c or g or t.
  misc_feature (527978)..(527978): n is a or c or g or t.
  misc_feature (960838)..(960839): n is a or c or g or t.
  misc_feature (960860)..(960861): n is a or c or g or t.
  misc_feature (960872)..(960873): n is a or c or g or t.
  misc_feature (960879)..(960879): n is a or c or g or t.
  misc_feature (960890)..(960890): n is a or c or g or t.
  misc_feature (1250239)..(1250239): n is a or c or g or t.
  misc_feature (1302432)..(1302434): n is a or c or g or t.
  misc_feature (1302471)..(1302471): n is a or c or g or t.
  misc_feature (1302488)..(1302488): n is a or c or g or t.
  misc_feature (1674836)..(1674836): n is a or c or g or t.
MVAQMRVYSPGRVNLIGEHTDYSYGYVLPMAIDRYTVIEGEPHERVELYSEHFKKSVSFELEKLEKGNNWADYVKGVYWVLQREGYEVGGMKGRVGGNLPLGSGLSSSASFELAVLAFLNEAYSLKLSRLDMALLAKKAENEFVGVPCGILDQFAIAFGREGKAIFLDTETLDYEYLPFPEDLEVLVFYTGVKRELASSAYAERKKAIEEALRVLGKSSSKYVTEEELSKLPEKERRYLGYVVRENSRVLAFRDALKEGDVEAMGQLMVEAHRDIAENYRVSCEELDFFVEKALELGALGARLTGAGFGGSAIALVEHGKGESLGREVAELYTKVFPWTPEVFVVRPSEGVMVL

SEQ ID NO: 1550 - protein, 38 aa, Thermococcus kodakaraensis KOD1
  misc_feature (321437)..(321437): n is a or c or g or t.
  misc_feature (527833)..(527833): n is a or c or g or t.
  misc_feature (527901)..(527901): n is a or c or g or t.
  misc_feature (527978)..(527978): n is a or c or g or t.
  misc_feature (960838)..(960839): n is a or c or g or t.
  misc_feature (960860)..(960861): n is a or c or g or t.
  misc_feature (960872)..(960873): n is a or c or g or t.
  misc_feature (960879)..(960879): n is a or c or g or t.
  misc_feature (960890)..(960890): n is a or c or g or t.
  misc_feature (1250239)..(1250239): n is a or c or g or t.
  misc_feature (1302432)..(1302434): n is a or c or g or t.
  misc_feature (1302471)..(1302471): n is a or c or g or t.
  misc_feature (1302488)..(1302488): n is a or c or g or t.
  misc_feature (1674836)..(1674836): n is a or c or g or t.
MVTILLQTFEVKVITTIVAAVQYAMLKAGPPLKNRSIT

SEQ ID NO: 1551 - protein, 301 aa, Thermococcus kodakaraensis KOD1
  misc_feature (321437)..(321437): n is a or c or g or t.
  misc_feature (527833)..(527833): n is a or c or g or t.
  misc_feature (527901)..(527901): n is a or c or g or t.
  misc_feature (527978)..(527978): n is a or c or g or t.
  misc_feature (960838)..(960839): n is a or c or g or t.
  misc_feature (960860)..(960861): n is a or c or g or t.
  misc_feature (960872)..(960873): n is a or c or g or t.
  misc_feature (960879)..(960879): n is a or c or g or t.
  misc_feature (960890)..(960890): n is a or c or g or t.
  misc_feature (1250239)..(1250239): n is a or c or g or t.
  misc_feature (1302432)..(1302434): n is a or c or g or t.
  misc_feature (1302471)..(1302471): n is a or c or g or t.
  misc_feature (1302488)..(1302488): n is a or c or g or t.
  misc_feature (1674836)..(1674836): n is a or c or g or t.
VHVGCLIRLNPGGWPLEELYRPIWVSIVGNLLLSVLKLVVGFLYSSIALISDGAHSLSDVVTSVIGYLGMRVSSKPPDKSHPFGHSRFEPLVAFLISEALLLVAYEIGRDSLFRLLHGTAIEVNSLMLGVTVLSILAKELMFRYSVYVGRKLKSQILVADAYHHRSDALSSVAVLVGLGLQKLGFKYGDALAGLVVAGFLVKVSAEIILENVGYLTGSAPPFEVCEEIRKRAMSVPNVLGVHDLRAHYVGNKLHVELHIEVPPEITLKGAHDISEEVKKRIEEMPEVERAFVHVDIKGVTE

SEQ ID NO: 1552 - protein, 209 aa, Thermococcus kodakaraensis KOD1
  misc_feature (321437)..(321437): n is a or c or g or t.
  misc_feature (527833)..(527833): n is a or c or g or t.
  misc_feature (527901)..(527901): n is a or c or g or t.
  misc_feature (527978)..(527978): n is a or c or g or t.
  misc_feature (960838)..(960839): n is a or c or g or t.
  misc_feature (960860)..(960861): n is a or c or g or t.
  misc_feature (960872)..(960873): n is a or c or g or t.
  misc_feature (960879)..(960879): n is a or c or g or t.
  misc_feature (960890)..(960890): n is a or c or g or t.
  misc_feature (1250239)..(1250239): n is a or c or g or t.
  misc_feature (1302432)..(1302434): n is a or c or g or t.
  misc_feature (1302471)..(1302471): n is a or c or g or t.
  misc_feature (1302488)..(1302488): n is a or c or g or t.
  misc_feature (1674836)..(1674836): n is a or c or g or t.
VSIRSELKRKALHLTGLTVPAIYLCCGKTTTLAFIGLAFVLFVVLEPFRIIEEWRDRIKYRLLNMYPSPELGRSIELIENHIEAITRPHERERVAAHIYFAAASFIVVYFFPMKVAVGAITVATLGDALAAIIGKSLGRHRFSSGKSLEGSLAYFLTALLVLIPLVSFAPALAGAVIGTIVEFYNVPPDDNFSNQLAVAVAVYLVFLVS

SEQ ID NO: 1553 - protein, 19 aa, Thermococcus kodakaraensis KOD1
  misc_feature (321437)..(321437): n is a or c or g or t.
  misc_feature (527833)..(527833): n is a or c or g or t.
  misc_feature (527901)..(527901): n is a or c or g or t.
  misc_feature (527978)..(527978): n is a or c or g or t.
  misc_feature (960838)..(960839): n is a or c or g or t.
  misc_feature (960860)..(960861): n is a or c or g or t.
  misc_feature (960872)..(960873): n is a or c or g or t.
  misc_feature (960879)..(960879): n is a or c or g or t.
  misc_feature (960890)..(960890): n is a or c or g or t.
  misc_feature (1250239)..(1250239): n is a or c or g or t.
  misc_feature (1302432)..(1302434): n is a or c or g or t.
  misc_feature (1302471)..(1302471): n is a or c or g or t.
  misc_feature (1302488)..(1302488): n is a or c or g or t.
  misc_feature (1674836)..(1674836): n is a or c or g or t.
VVACGSQLIARMVNWIRVI

SEQ ID NO: 1554 - protein, 473 aa, Thermococcus kodakaraensis KOD1
  misc_feature (321437)..(321437): n is a or c or g or t.
  misc_feature (527833)..(527833): n is a or c or g or t.
  misc_feature (527901)..(527901): n is a or c or g or t.
  misc_feature (527978)..(527978): n is a or c or g or t.
  misc_feature (960838)..(960839): n is a or c or g or t.
  misc_feature (960860)..(960861): n is a or c or g or t.
  misc_feature (960872)..(960873): n is a or c or g or t.
  misc_feature (960879)..(960879): n is a or c or g or t.
  misc_feature (960890)..(960890): n is a or c or g or t.
  misc_feature (1250239)..(1250239): n is a or c or g or t.
  misc_feature (1302432)..(1302434): n is a or c or g or t.
  misc_feature (1302471)..(1302471): n is a or c or g or t.
  misc_feature (1302488)..(1302488): n is a or c or g or t.
  misc_feature (1674836)..(1674836): n is a or c or g or t.
MRWVDFKESLSEFWADFKRQKTGLLGIFLLALLIFTALAAPILTSPDIPEKWKTFWLDNPKNVPPTWVNVFSSQKLAPHLVLEGSELQKYLKQTDSGYVIEIPYNNEYDVPPQDIVFKDVVGKSEGIRKPTLTVKVKRPDGTEVVLLQNYKFSGNTVIQLGTNPAVRDALIRWVKSQGIQIDPTKEFQYKTLMDATRVIFGKLNENILEKPEPLQGTYTFIFEINVPKDASVDLDNAKIIFTGRTYGWLGTDFKGRDLLAGIIWGSRVSLAIGVSVAVFSVLIGIFYGVTSAYFGGWTDEMMMRFQEFMASIPSLPILILMGTYFGGHISLWQIVLLLVVFGWVGVARVARSMALQIKEQTYVEAARVLGASTGRIIFKHMVPQLLPYAFASMALGVPGAVLSEASLSFLGLGDPTAVTWGQILHDAQAAGAATNGYWWWVLPPGLAIALVGFTFVMIGTALDRVLNPRLRRM

SEQ ID NO: 1555 - protein, 335 aa, Thermococcus kodakaraensis KOD1
  misc_feature (321437)..(321437): n is a or c or g or t.
  misc_feature (527833)..(527833): n is a or c or g or t.
  misc_feature (527901)..(527901): n is a or c or g or t.
  misc_feature (527978)..(527978): n is a or c or g or t.
  misc_feature (960838)..(960839): n is a or c or g or t.
  misc_feature (960860)..(960861): n is a or c or g or t.
  misc_feature (960872)..(960873): n is a or c or g or t.
  misc_feature (960879)..(960879): n is a or c or g or t.
  misc_feature (960890)..(960890): n is a or c or g or t.
  misc_feature (1250239)..(1250239): n is a or c or g or t.
  misc_feature (1302432)..(1302434): n is a or c or g or t.
  misc_feature (1302471)..(1302471): n is a or c or g or t.
  misc_feature (1302488)..(1302488): n is a or c or g or t.
  misc_feature (1674836)..(1674836): n is a or c or g or t.
MAEPVLKVENLKKYFPIKRGFIESLKGAPQRFVHAVDGVSFEIYKQQVFALVGESGCGKSTTGKLIVKLLEPTDGKIYLEGRDVTDIKTKEEILAYRRKVQMIFQDPFSSMNPRFRIFDVLEEPLLIHGIGETRAEREELIYKALEMVKITPPEDYVGRFPHMLSGGQRQRVAIARALILNPTFIVADEPVSMLDVSIRAEVLELMKELKEKTGVTYLYITHDMSTARYFADWMAVMYLGRIVEMGPAEKVIDNPLHPYTRALLAAVPEPKPERRNVIKELPIKGEVPSAVNIPPGCRFHPRCIYAQKGLCDAKQPQLIEYEHNHFAECHLVGKY

SEQ ID NO: 1556 - protein, 58 aa, Thermococcus kodakaraensis KOD1
  misc_feature (321437)..(321437): n is a or c or g or t.
  misc_feature (527833)..(527833): n is a or c or g or t.
  misc_feature (527901)..(527901): n is a or c or g or t.
  misc_feature (527978)..(527978): n is a or c or g or t.
  misc_feature (960838)..(960839): n is a or c or g or t.
  misc_feature (960860)..(960861): n is a or c or g or t.
  misc_feature (960872)..(960873): n is a or c or g or t.
  misc_feature (960879)..(960879): n is a or c or g or t.
  misc_feature (960890)..(960890): n is a or c or g or t.
  misc_feature (1250239)..(1250239): n is a or c or g or t.
  misc_feature (1302432)..(1302434): n is a or c or g or t.
  misc_feature (1302471)..(1302471): n is a or c or g or t.
  misc_feature (1302488)..(1302488): n is a or c or g or t.
  misc_feature (1674836)..(1674836): n is a or c or g or t.
VDRGYFRVRGKIEVKVIETILGQFDPLEEKSEGRYPRYLLPRIRRILPTTTTYAFIME

SEQ ID NO: 1557 - protein, 197 aa, Thermococcus kodakaraensis KOD1
  misc_feature (321437)..(321437): n is a or c or g or t.
  misc_feature (527833)..(527833): n is a or c or g or t.
  misc_feature (527901)..(527901): n is a or c or g or t.
  misc_feature (527978)..(527978): n is a or c or g or t.
  misc_feature (960838)..(960839): n is a or c or g or t.
  misc_feature (960860)..(960861): n is a or c or g or t.
  misc_feature (960872)..(960873): n is a or c or g or t.
  misc_feature (960879)..(960879): n is a or c or g or t.
  misc_feature (960890)..(960890): n is a or c or g or t.
  misc_feature (1250239)..(1250239): n is a or c or g or t.
  misc_feature (1302432)..(1302434): n is a or c or g or t.
  misc_feature (1302471)..(1302471): n is a or c or g or t.
  misc_feature (1302488)..(1302488): n is a or c or g or t.
  misc_feature (1674836)..(1674836): n is a or c or g or t.
VEVSPGQRIRVAGIVKVRDYIYLYPSEPKDIALLGYSKLKPLWNSSIGDIVEAKCLVLDSGSTLKLNCTDLRLYGFKARVGDVVHIRALRRKSSLLCLNCSVVHPREKLPNELCEYSPGNFAKISGTVTWVKRYRNGFGLANVTDGNCWVLLKLPKSLGVSVASGENVTAYGFFTTYREKPAFEIQSGEDLCSGISC

SEQ ID NO: 1558 - protein, 156 aa, Thermococcus kodakaraensis KOD1
  misc_feature (321437)..(321437): n is a or c or g or t.
  misc_feature (527833)..(527833): n is a or c or g or t.
  misc_feature (527901)..(527901): n is a or c or g or t.
  misc_feature (527978)..(527978): n is a or c or g or t.
  misc_feature (960838)..(960839): n is a or c or g or t.
  misc_feature (960860)..(960861): n is a or c or g or t.
  misc_feature (960872)..(960873): n is a or c or g or t.
  misc_feature (960879)..(960879): n is a or c or g or t.
  misc_feature (960890)..(960890): n is a or c or g or t.
  misc_feature (1250239)..(1250239): n is a or c or g or t.
  misc_feature (1302432)..(1302434): n is a or c or g or t.
  misc_feature (1302471)..(1302471): n is a or c or g or t.
  misc_feature (1302488)..(1302488): n is a or c or g or t.
  misc_feature (1674836)..(1674836): n is a or c or g or t.
VHPDTEIYWYYYLNSSGLHFLGAECYNPMYVMCPRLSLNVSDNLARFKSKGRLVSGLHENGFLGFDFGNESYKVSLSEILPYLWDEGWIDYLSGYRLNGSLVFFPAVTIEITGADVKCVDCIPGEGAVSVRFKQLYNVTYYTRNSGTTWKRSTIKK

SEQ ID NO: 1559 - protein, 35 aa, Thermococcus kodakaraensis KOD1
  misc_feature (321437)..(321437): n is a or c or g or t.
  misc_feature (527833)..(527833): n is a or c or g or t.
  misc_feature (527901)..(527901): n is a or c or g or t.
  misc_feature (527978)..(527978): n is a or c or g or t.
  misc_feature (960838)..(960839): n is a or c or g or t.
  misc_feature (960860)..(960861): n is a or c or g or t.
  misc_feature (960872)..(960873): n is a or c or g or t.
  misc_feature (960879)..(960879): n is a or c or g or t.
  misc_feature (960890)..(960890): n is a or c or g or t.
  misc_feature (1250239)..(1250239): n is a or c or g or t.
  misc_feature (1302432)..(1302434): n is a or c or g or t.
  misc_feature (1302471)..(1302471): n is a or c or g or t.
  misc_feature (1302488)..(1302488): n is a or c or g or t.
  misc_feature (1674836)..(1674836): n is a or c or g or t.
VDEVFFKPENLIHSYHLVSLVMIKLMPVNLNVFGG

SEQ ID NO: 1560 - protein, 341 aa, Thermococcus kodakaraensis KOD1
  misc_feature (321437)..(321437): n is a or c or g or t.
  misc_feature (527833)..(527833): n is a or c or g or t.
  misc_feature (527901)..(527901): n is a or c or g or t.
  misc_feature (527978)..(527978): n is a or c or g or t.
  misc_feature (960838)..(960839): n is a or c or g or t.
  misc_feature (960860)..(960861): n is a or c or g or t.
  misc_feature (960872)..(960873): n is a or c or g or t.
  misc_feature (960879)..(960879): n is a or c or g or t.
  misc_feature (960890)..(960890): n is a or c or g or t.
  misc_feature (1250239)..(1250239): n is a or c or g or t.
  misc_feature (1302432)..(1302434): n is a or c or g or t.
  misc_feature (1302471)..(1302471): n is a or c or g or t.
  misc_feature (1302488)..(1302488): n is a or c or g or t.
  misc_feature (1674836)..(1674836): n is a or c or g or t.
MREDEIIEKLQRLGLTKYESLAYITLLKLGPSKATDITKESGIPHTRVYDVLSSLHRKGFVDVMQGTPRLYKPVNPEVVLERIKEELIEDIEALKKAFLDLYREAHGEELPEIWTIQGFDNTLERAEHVIRTAKHEVLINTPFEFLKLLQGEIKNRKDVIFVIISNFGDEIPNWLKGDNIILARSGGAPWLMASWIIGDIDYALFFGALPKDRRREKFYSFWAKSPRIIQNYMHWFYTIYFDNSEVIKPLAYERLQKPVSLVNIRTLITVLKFAGLPRKAEIVGKLIDTKEPVTLDGEIVDYEYTPLTANVTFKYNGKQLKVGGIGSYFEDVEGEKFILLE

SEQ ID NO: 1561 - protein, 448 aa, Thermococcus kodakaraensis KOD1
  misc_feature (321437)..(321437): n is a or c or g or t.
  misc_feature (527833)..(527833): n is a or c or g or t.
  misc_feature (527901)..(527901): n is a or c or g or t.
  misc_feature (527978)..(527978): n is a or c or g or t.
  misc_feature (960838)..(960839): n is a or c or g or t.
  misc_feature (960860)..(960861): n is a or c or g or t.
  misc_feature (960872)..(960873): n is a or c or g or t.
  misc_feature (960879)..(960879): n is a or c or g or t.
  misc_feature (960890)..(960890): n is a or c or g or t.
  misc_feature (1250239)..(1250239): n is a or c or g or t.
  misc_feature (1302432)..(1302434): n is a or c or g or t.
  misc_feature (1302471)..(1302471): n is a or c or g or t.
  misc_feature (1302488)..(1302488): n is a or c or g or t.
  misc_feature (1674836)..(1674836): n is a or c or g or t.
MRILMLGFEYLPVKVGGLAEALTSIGEGLAGLGNEVVVFTPDHGRKLGEELASFRVLLEGREVEVKVRKREQNGVIVYSLGGSYLDLDVYPGWEDLLKKAVLFGKASAGLMNILIGEFKPDVVHAHDWHTVFALGLLKKYFGVRAVFTVHRLNRAKVPASYFHEANLGELAPFPDLDPEHTAGYIADAVTTVSRSYLWEEWSFFKNFDGKVTHVFNGIDCSYWNEEFLEGKDLPREERRKRILQRFGLSDGKAFMFIGRFDRAQKGVDTLLRAIELLSTDPAFKSLRFLIVGKGDPGLESWARETERRFPENVKVITELLSRETVRELYGSVDFVVIPSYFEPFGLVQLEAMCLGAIPIGSAVGGIKDTVIDLDADPERATGLLVPPRDAFALARTIIRASELDEETLKRLRENGKRRAREDFTWEKACRRYLRVYQNAVDKAIPFLR

SEQ ID NO: 1562 - protein, 481 aa, Thermococcus kodakaraensis KOD1
  misc_feature (321437)..(321437): n is a or c or g or t.
  misc_feature (527833)..(527833): n is a or c or g or t.
  misc_feature (527901)..(527901): n is a or c or g or t.
  misc_feature (527978)..(527978): n is a or c or g or t.
  misc_feature (960838)..(960839): n is a or c or g or t.
  misc_feature (960860)..(960861): n is a or c or g or t.
  misc_feature (960872)..(960873): n is a or c or g or t.
  misc_feature (960879)..(960879): n is a or c or g or t.
  misc_feature (960890)..(960890): n is a or c or g or t.
  misc_feature (1250239)..(1250239): n is a or c or g or t.
  misc_feature (1302432)..(1302434): n is a or c or g or t.
  misc_feature (1302471)..(1302471): n is a or c or g or t.
  misc_feature (1302488)..(1302488): n is a or c or g or t.
  misc_feature (1674836)..(1674836): n is a or c or g or t.
MTFEPFISVSMVSAKRSSSTCFLSTLTIPVWLFSSNLMNHGFALAEPRYPRAERLASQTAFFISSFLKGLSPITWNAMYLFLSLSVGGRYFGFSLIPTPSRICPPTFLSPPPTWACEVRWLVWETPYFSYAVRELPKGCQLCVRGEKLVLFTTGVCPRDCFYCPLSPWRRGDVVYANERPVKNVDDVIEEARIQEAKGAGITGGDPLARLERTVEYIRTLKENFGKDFHIHLYTTGALATEKALSKLYDAGLDEIRFHPDLFNPNSKLFKVEIENIRKAFDFDWDVGGEIPSIPGQLDRMKWYAEFLDKHGAKFLNVNELEFSEMTLKTLLDMGFQPVSDESSAIKGSLELGLEFLEWGEENTSLSYHLCTAKLKDAVQLKNRLRRMARNVARPYMEVTEEGTLRFGIAEYDDLDELYEFLVEEAEVPSEWLHINREKGRIEMPEEVAVELADAVEGDVKFFIVEEYPTWDRLEVERIPLP

SEQ ID NO: 1563 - protein, 401 aa, Thermococcus kodakaraensis KOD1
  misc_feature (351)..(351): The 'Xaa' at location 351 stands for Leu.
  misc_feature (374)..(374): The 'Xaa' at location 374 stands for Gln, Arg, Pro, or Leu.
  misc_feature (400)..(400): The 'Xaa' at location 400 stands for Thr, Ala, Pro, or Ser.
  misc_feature (321437)..(321437): n is a or c or g or t.
  misc_feature (527833)..(527833): n is a or c or g or t.
  misc_feature (527901)..(527901): n is a or c or g or t.
  misc_feature (527978)..(527978): n is a or c or g or t.
  misc_feature (960838)..(960839): n is a or c or g or t.
  misc_feature (960860)..(960861): n is a or c or g or t.
  misc_feature (960872)..(960873): n is a or c or g or t.
  misc_feature (960879)..(960879): n is a or c or g or t.
  misc_feature (960890)..(960890): n is a or c or g or t.
  misc_feature (1250239)..(1250239): n is a or c or g or t.
  misc_feature (1302432)..(1302434): n is a or c or g or t.
  misc_feature (1302471)..(1302471): n is a or c or g or t.
  misc_feature (1302488)..(1302488): n is a or c or g or t.
  misc_feature (1674836)..(1674836): n is a or c or g or t.
MKKATAVALVAIFILGLFEAGYGLAAESLPRNETLYTANSAPPTNANPFTGGSVLGIDGLVFEPLFMFNFMTGELKPWLAESGKWVGDNVFEVKLRSGLKWQDGEPLTAEDVKFSYEYYEKIGLRNWGDLGLKEIKVVDDRTVQFIFDGTPNYQLWQLQMFFGWGQGALIVPKHVFENINPEDIPKMTFTGDEMKYLVGSGAYKLKEVVGQEKAILERNDDWWGVKVFGKPGPKYIVQLYVTDNNQAANMFIKGDLDVGTYYIDIVSAKQKNPKLVSWLDKYPYFPPVDPVLLYFNTKHAPLDNPKVRRAIAMAIMPYQIVNQAPISELPKEVPFGPGLLKTWGDRLVVPXSVAPRVLHTMQHCGAAYRCLSTXDSDLQIRYKSLCMCNVTVSHCLPCGXA

SEQ ID NO: 1564 - protein, 337 aa, Thermococcus kodakaraensis KOD1
  misc_feature (321437)..(321437): n is a or c or g or t.
  misc_feature (527833)..(527833): n is a or c or g or t.
  misc_feature (527901)..(527901): n is a or c or g or t.
  misc_feature (527978)..(527978): n is a or c or g or t.
  misc_feature (960838)..(960839): n is a or c or g or t.
  misc_feature (960860)..(960861): n is a or c or g or t.
  misc_feature (960872)..(960873): n is a or c or g or t.
  misc_feature (960879)..(960879): n is a or c or g or t.
  misc_feature (960890)..(960890): n is a or c or g or t.
  misc_feature (1250239)..(1250239): n is a or c or g or t.
  misc_feature (1302432)..(1302434): n is a or c or g or t.
  misc_feature (1302471)..(1302471): n is a or c or g or t.
  misc_feature (1302488)..(1302488): n is a or c or g or t.
  misc_feature (1674836)..(1674836): n is a or c or g or t.
MEGSCMASGGFRKYLMRKTFVYLITFLFAVTLNWLLPRLMPGNPIEGMMAQAGTGGSVNDALVRFYERLYGLDQPLWKQFLNFWSSLFHGDLGYSILYRAPVADIIKHALPYDIVILLPAIVLSWLVGNWLGALAGKNKMYDRYAMPVFYFLASMPYFWFAMLLVYVVGVELGWLPYQGAYDPSLVPSISLSFVGDFLKHWILPFLSLFTVMIGSWAIGMRNMIIYELEADYVRYLEALGGSERLLTKHAYRNAILPQVTGLALQLGLMVAGAIATEIVFNYPGIGVLIMNAALSQDYFLLQGAFLMVVIAVLLANFLIDIIYAFIDPRVRASYTEG

SEQ ID NO: 1565 - protein, 80 aa, Thermococcus kodakaraensis KOD1
  misc_feature (321437)..(321437): n is a or c or g or t.
  misc_feature (527833)..(527833): n is a or c or g or t.
  misc_feature (527901)..(527901): n is a or c or g or t.
  misc_feature (527978)..(527978): n is a or c or g or t.
  misc_feature (960838)..(960839): n is a or c or g or t.
  misc_feature (960860)..(960861): n is a or c or g or t.
  misc_feature (960872)..(960873): n is a or c or g or t.
  misc_feature (960879)..(960879): n is a or c or g or t.
  misc_feature (960890)..(960890): n is a or c or g or t.
  misc_feature (1250239)..(1250239): n is a or c or g or t.
  misc_feature (1302432)..(1302434): n is a or c or g or t.
  misc_feature (1302471)..(1302471): n is a or c or g or t.
  misc_feature (1302488)..(1302488): n is a or c or g or t.
  misc_feature (1674836)..(1674836): n is a or c or g or t.
VVPLGKTITIADDVYYELVKMKGKKSFSELLRELIGKKKKGNLDVLMIAFGTRTPEEVEELKKELKEVEEWMDSWTPASL

SEQ ID NO: 1566 - protein, 178 aa, Thermococcus kodakaraensis KOD1
  misc_feature (321437)..(321437): n is a or c or g or t.
  misc_feature (527833)..(527833): n is a or c or g or t.
  misc_feature (527901)..(527901): n is a or c or g or t.
  misc_feature (527978)..(527978): n is a or c or g or t.
  misc_feature (960838)..(960839): n is a or c or g or t.
  misc_feature (960860)..(960861): n is a or c or g or t.
  misc_feature (960872)..(960873): n is a or c or g or t.
  misc_feature (960879)..(960879): n is a or c or g or t.
  misc_feature (960890)..(960890): n is a or c or g or t.
  misc_feature (1250239)..(1250239): n is a or c or g or t.
  misc_feature (1302432)..(1302434): n is a or c or g or t.
  misc_feature (1302471)..(1302471): n is a or c or g or t.
  misc_feature (1302488)..(1302488): n is a or c or g or t.
  misc_feature (1674836)..(1674836): n is a or c or g or t.
MKVAVGSTNPAKVEAVREVFLGIYGDVEVVPIEVDSGVPDQPVGLEETVKGAINRAKQAIEKTDADFGVGIEAGLYRVPETITGYMDVQFCAVVDREGRITLGHGPGFEYPPGVIRRVFEEGVEVGIAMGELVNDPELKRKIGAIGVLTHGMLVRKELNKLAVLMALVPRLNPEWYGL

SEQ ID NO: 1567 - protein, 596 aa, Thermococcus kodakaraensis KOD1
  misc_feature (321437)..(321437): n is a or c or g or t.
  misc_feature (527833)..(527833): n is a or c or g or t.
  misc_feature (527901)..(527901): n is a or c or g or t.
  misc_feature (527978)..(527978): n is a or c or g or t.
  misc_feature (960838)..(960839): n is a or c or g or t.
  misc_feature (960860)..(960861): n is a or c or g or t.
  misc_feature (960872)..(960873): n is a or c or g or t.
  misc_feature (960879)..(960879): n is a or c or g or t.
  misc_feature (960890)..(960890): n is a or c or g or t.
  misc_feature (1250239)..(1250239): n is a or c or g or t.
  misc_feature (1302432)..(1302434): n is a or c or g or t.
  misc_feature (1302471)..(1302471): n is a or c or g or t.
  misc_feature (1302488)..(1302488): n is a or c or g or t.
  misc_feature (1674836)..(1674836): n is a or c or g or t.
MDFRKAHKLPNCITHGETMEMKYAHHFHAYQPGDIVYVKDGDGKSPIEYEERKSPVSIKIRDEYVKGENWTRAMLYSYEYINDVLGRMKGVSVDIEPFTFLMLLHYRRRAFEETVELLRELDAVPTTPFHPIVPHLDRFEQEILAKVSFDFYSPLIENRPVVGYWLPEAVITRESASIVESSTDRKLVFLLDERQLLYDFPQAKYSCNRYLNSFVFGREWELSDAFAFNTLDVLGLIGKTLERRDEYKESVGVPYLVFTASDLESLLGNPAQLDRFISWMKGLEENGVERVSAMEFVRRKLSGEFRRLDGECSFEMGVKDYSAWSDYFDLSLDGKTSDSRWLGYRRADGKVFARAVNGRKISQLWKVAFTRLFEELNRVVRLGVLRALEDIGADRERAAEFLVRYARVFFRDYYDYFGMDTSLDYVLEPANGEEKALKLGRVYYLMLLANHSCPRFWENLDTRVAFGNVSVLSKALIELMEYFEGSELQGLFIGAYLKLLNFGELYHLWNLGTLPSLEGWETTEKAWADALAPEVPNSGYNVVTRAALFVGKRDLRGSLRELIENYKLEWAVADTGHIPGEAHGHWENREWCEHRG

SEQ ID NO: 1568 - protein, 33 aa, Thermococcus kodakaraensis KOD1
  misc_feature (321437)..(321437): n is a or c or g or t.
  misc_feature (527833)..(527833): n is a or c or g or t.
  misc_feature (527901)..(527901): n is a or c or g or t.
  misc_feature (527978)..(527978): n is a or c or g or t.
  misc_feature (960838)..(960839): n is a or c or g or t.
  misc_feature (960860)..(960861): n is a or c or g or t.
  misc_feature (960872)..(960873): n is a or c or g or t.
  misc_feature (960879)..(960879): n is a or c or g or t.
  misc_feature (960890)..(960890): n is a or c or g or t.
  misc_feature (1250239)..(1250239): n is a or c or g or t.
  misc_feature (1302432)..(1302434): n is a or c or g or t.
  misc_feature (1302471)..(1302471): n is a or c or g or t.
  misc_feature (1302488)..(1302488): n is a or c or g or t.
  misc_feature (1674836)..(1674836): n is a or c or g or t.
MEGLIYQLSKSVAQLFSGLLFGAFGVTNKVVLK

SEQ ID NO: 1569 - protein, 19 aa, Thermococcus kodakaraensis KOD1
  misc_feature (321437)..(321437): n is a or c or g or t.
  misc_feature (527833)..(527833): n is a or c or g or t.
  misc_feature (527901)..(527901): n is a or c or g or t.
  misc_feature (527978)..(527978): n is a or c or g or t.
  misc_feature (960838)..(960839): n is a or c or g or t.
  misc_feature (960860)..(960861): n is a or c or g or t.
  misc_feature (960872)..(960873): n is a or c or g or t.
  misc_feature (960879)..(960879): n is a or c or g or t.
  misc_feature (960890)..(960890): n is a or c or g or t.
  misc_feature (1250239)..(1250239): n is a or c or g or t.
  misc_feature (1302432)..(1302434): n is a or c or g or t.
  misc_feature (1302471)..(1302471): n is a or c or g or t.
  misc_feature (1302488)..(1302488): n is a or c or g or t.
  misc_feature (1674836)..(1674836): n is a or c or g or t.
MINSTIRIAMAFNDIISEE

SEQ ID NO: 1570 - protein, 58 aa, Thermococcus kodakaraensis KOD1
  misc_feature (321437)..(321437): n is a or c or g or t.
  misc_feature (527833)..(527833): n is a or c or g or t.
  misc_feature (527901)..(527901): n is a or c or g or t.
  misc_feature (527978)..(527978): n is a or c or g or t.
  misc_feature (960838)..(960839): n is a or c or g or t.
  misc_feature (960860)..(960861): n is a or c or g or t.
  misc_feature (960872)..(960873): n is a or c or g or t.
  misc_feature (960879)..(960879): n is a or c or g or t.
  misc_feature (960890)..(960890): n is a or c or g or t.
  misc_feature (1250239)..(1250239): n is a or c or g or t.
  misc_feature (1302432)..(1302434): n is a or c or g or t.
  misc_feature (1302471)..(1302471): n is a or c or g or t.
  misc_feature (1302488)..(1302488): n is a or c or g or t.
  misc_feature (1674836)..(1674836): n is a or c or g or t.
VNPVILVNVSSLPVAFKKLPNSEFRNINGTAKAKILSIGTLARKPSPNTSIVPHLAKT

SEQ ID NO: 1571 - protein, 223 aa, Thermococcus kodakaraensis KOD1
  misc_feature (321437)..(321437): n is a or c or g or t.
  misc_feature (527833)..(527833): n is a or c or g or t.
  misc_feature (527901)..(527901): n is a or c or g or t.
  misc_feature (527978)..(527978): n is a or c or g or t.
  misc_feature (960838)..(960839): n is a or c or g or t.
  misc_feature (960860)..(960861): n is a or c or g or t.
  misc_feature (960872)..(960873): n is a or c or g or t.
  misc_feature (960879)..(960879): n is a or c or g or t.
  misc_feature (960890)..(960890): n is a or c or g or t.
  misc_feature (1250239)..(1250239): n is a or c or g or t.
  misc_feature (1302432)..(1302434): n is a or c or g or t.
  misc_feature (1302471)..(1302471): n is a or c or g or t.
  misc_feature (1302488)..(1302488): n is a or c or g or t.
  misc_feature (1674836)..(1674836): n is a or c or g or t.
MWCRNTSGISEPASVPQCLRIGGEKMKKNLALGIFGLLVAFGLVLGAGANFRDYNADRSVHWNIVTDDNELIDLTPIQPYAYINDGGVLVVDISPNNPNYPGYGMGLSPNSEYNFDEVFEVSNDLWEEGMPIVVRITSDNTMIQFYGHEFDVHDSTTGQTVYASDMARNDVCFVVNNGDAVKVGMDFTVANDAPGTTNNAAVHIEAYRLGTEPAEIAGNCGQP

SEQ ID NO: 1572 - protein, 335 aa, Thermococcus kodakaraensis KOD1
  misc_feature (321437)..(321437): n is a or c or g or t.
  misc_feature (527833)..(527833): n is a or c or g or t.
  misc_feature (527901)..(527901): n is a or c or g or t.
  misc_feature (527978)..(527978): n is a or c or g or t.
  misc_feature (960838)..(960839): n is a or c or g or t.
  misc_feature (960860)..(960861): n is a or c or g or t.
  misc_feature (960872)..(960873): n is a or c or g or t.
  misc_feature (960879)..(960879): n is a or c or g or t.
  misc_feature (960890)..(960890): n is a or c or g or t.
  misc_feature (1250239)..(1250239): n is a or c or g or t.
  misc_feature (1302432)..(1302434): n is a or c or g or t.
  misc_feature (1302471)..(1302471): n is a or c or g or t.
  misc_feature (1302488)..(1302488): n is a or c or g or t.
  misc_feature (1674836)..(1674836): n is a or c or g or t.
VVGFILDRPILVSYAYSESMTPTINKGDLFFINPLSRNAEVGDIIVFHRRDGWTVHRVYAIVDGKYITKGDHNVATDQQDGAYPEVEHVDIAGKVVQISNHPLVIRGGGDFIVNLRKRLTNVYAIVIIVILGGLLTFSGSSKERSRRRSKRRRFIRIQGKTLYGIVSVLIISGFLAVIIASWGTLAFTYSSTLAGGQTDGWHLPGTTFEKNLSVENHAVYPFYYFFKDDSGRVELKTTGFRLGGGEAQNLSLTVTVPVDTRIYREEVSVWSYPALLPYSLINWAYSISPYFPLVLYLIPLSVLMLAFYWISGISGEMISIRKGKILSKLTGDGRL

SEQ ID NO: 1573 - protein, 320 aa, Thermococcus kodakaraensis KOD1
  misc_feature (321437)..(321437): n is a or c or g or t.
  misc_feature (527833)..(527833): n is a or c or g or t.
  misc_feature (527901)..(527901): n is a or c or g or t.
  misc_feature (527978)..(527978): n is a or c or g or t.
  misc_feature (960838)..(960839): n is a or c or g or t.
  misc_feature (960860)..(960861): n is a or c or g or t.
  misc_feature (960872)..(960873): n is a or c or g or t.
  misc_feature (960879)..(960879): n is a or c or g or t.
  misc_feature (960890)..(960890): n is a or c or g or t.
  misc_feature (1250239)..(1250239): n is a or c or g or t.
  misc_feature (1302432)..(1302434): n is a or c or g or t.
  misc_feature (1302471)..(1302471): n is a or c or g or t.
  misc_feature (1302488)..(1302488): n is a or c or g or t.
  misc_feature (1674836)..(1674836): n is a or c or g or t.
MKVNKKKALIAGLGISLSLAVLFGVYSVIAYATPVSTRDVSYTTAYSEGGSLRHYALFSNETVYQNGTSLKYYPSGITDVIRGEYRYSTSPGASGSYKIEMHSNYYVSVNRKPVYLLNRTTEIASGNFAGSFSVPVKFNMTSLGEELKKIREGTDLHRAENEVYLTVTVSINGREPFTQKIQLKKDTSGMLSLDGATKDYQKVERNVSITENSVGFVGTSVKDSTARKVFPAMALLFAVPPLGFVYSKREKKPKDELASLRKYVVEGKSPEGTRKVELKTPEDLKRVFELVDRPIVHDGSNEGDVYSIADGDTVYEYQQL

SEQ ID NO: 1574 - protein, 178 aa, Thermococcus kodakaraensis KOD1
  misc_feature (321437)..(321437): n is a or c or g or t.
  misc_feature (527833)..(527833): n is a or c or g or t.
  misc_feature (527901)..(527901): n is a or c or g or t.
  misc_feature (527978)..(527978): n is a or c or g or t.
  misc_feature (960838)..(960839): n is a or c or g or t.
  misc_feature (960860)..(960861): n is a or c or g or t.
  misc_feature (960872)..(960873): n is a or c or g or t.
  misc_feature (960879)..(960879): n is a or c or g or t.
  misc_feature (960890)..(960890): n is a or c or g or t.
  misc_feature (1250239)..(1250239): n is a or c or g or t.
  misc_feature (1302432)..(1302434): n is a or c or g or t.
  misc_feature (1302471)..(1302471): n is a or c or g or t.
  misc_feature (1302488)..(1302488): n is a or c or g or t.
  misc_feature (1674836)..(1674836): n is a or c or g or t.
MNPFHELEPGPEVPEVVYALIEIPKGSRNKYELDKKTGLLKLDRVLYSPFFYPVDYGIIPQTWYDDGDPFDIMVIMREPVYPLTIVEARPIGIMKMEDSGDKDWKVLAVPVEDPYFKDWKDIDDVPKAFLDEIAHFFQRYKELQGKTTTVEGWGNAEEAKKEILRAIELYKEKFGKKE

SEQ ID NO: 1575 - protein, 190 aa, Thermococcus kodakaraensis KOD1
  misc_feature (321437)..(321437): n is a or c or g or t.
  misc_feature (527833)..(527833): n is a or c or g or t.
  misc_feature (527901)..(527901): n is a or c or g or t.
  misc_feature (527978)..(527978): n is a or c or g or t.
  misc_feature (960838)..(960839): n is a or c or g or t.
  misc_feature (960860)..(960861): n is a or c or g or t.
  misc_feature (960872)..(960873): n is a or c or g or t.
  misc_feature (960879)..(960879): n is a or c or g or t.
  misc_feature (960890)..(960890): n is a or c or g or t.
  misc_feature (1250239)..(1250239): n is a or c or g or t.
  misc_feature (1302432)..(1302434): n is a or c or g or t.
  misc_feature (1302471)..(1302471): n is a or c or g or t.
  misc_feature (1302488)..(1302488): n is a or c or g or t.
  misc_feature (1674836)..(1674836): n is a or c or g or t.
MYKLLKVKDVVRIPPRMFTMDPKEAAKIVLRETYEGIYDRDEGVVLAILDVEEISEGVIVPGDGATYHEAIFNVLVWEPRNQEVVEGEVVEMMPYGAFIRIGPMDGLVHISQLMDDYVVFDEKNRQFIGKETNRVLKLGDYVRARIIGVSVKSRVIRENKINMTMRQPGLGKFEWIEKEKKKAKEESKGE

SEQ ID NO: 1576 - protein, 57 aa, Thermococcus kodakaraensis KOD1
  misc_feature (321437)..(321437): n is a or c or g or t.
  misc_feature (527833)..(527833): n is a or c or g or t.
  misc_feature (527901)..(527901): n is a or c or g or t.
  misc_feature (527978)..(527978): n is a or c or g or t.
  misc_feature (960838)..(960839): n is a or c or g or t.
  misc_feature (960860)..(960861): n is a or c or g or t.
  misc_feature (960872)..(960873): n is a or c or g or t.
  misc_feature (960879)..(960879): n is a or c or g or t.
  misc_feature (960890)..(960890): n is a or c or g or t.
  misc_feature (1250239)..(1250239): n is a or c or g or t.
  misc_feature (1302432)..(1302434): n is a or c or g or t.
  misc_feature (1302471)..(1302471): n is a or c or g or t.
  misc_feature (1302488)..(1302488): n is a or c or g or t.
  misc_feature (1674836)..(1674836): n is a or c or g or t.
MAKGKKKTSQKWKLYEVKGGKVVRKNKFCPRCGPGVFMANHKDRWSCGRCGYTEWKK

SEQ ID NO: 1577 - protein, 284 aa, Thermococcus kodakaraensis KOD1
  misc_feature (321437)..(321437): n is a or c or g or t.
  misc_feature (527833)..(527833): n is a or c or g or t.
  misc_feature (527901)..(527901): n is a or c or g or t.
  misc_feature (527978)..(527978): n is a or c or g or t.
  misc_feature (960838)..(960839): n is a or c or g or t.
  misc_feature (960860)..(960861): n is a or c or g or t.
  misc_feature (960872)..(960873): n is a or c or g or t.
  misc_feature (960879)..(960879): n is a or c or g or t.
  misc_feature (960890)..(960890): n is a or c or g or t.
  misc_feature (1250239)..(1250239): n is a or c or g or t.
  misc_feature (1302432)..(1302434): n is a or c or g or t.
  misc_feature (1302471)..(1302471): n is a or c or g or t.
  misc_feature (1302488)..(1302488): n is a or c or g or t.
  misc_feature (1674836)..(1674836): n is a or c or g or t.
VGYKITAKENLSVIDFFMEVEAPHVARSWKPGQFIVLIVDEKGERVPMSVYYADKDTGRVGMFIRRHGVTTFKLWYEKQVGDELLSVAGPLGKPIEVKHYGNVVFAADAVCAQAECYATLKAMKEAGNYTIAIHSFETKDHVYPEKFLSKPVADEFYITTEDGSVGRKGHYLDVLKELIEQDKVDIVFAGGKLGSLKKLAELTRPYGIPTITTVRQIMVDGTGMCGSCRILYDGEVKFACRDGPMFDAHKVDWDDVIRRDSRFAEQQALARERYLAKLREKGVI

SEQ ID NO: 1578 - protein, 481 aa, Thermococcus kodakaraensis KOD1
  misc_feature (321437)..(321437): n is a or c or g or t.
  misc_feature (527833)..(527833): n is a or c or g or t.
  misc_feature (527901)..(527901): n is a or c or g or t.
  misc_feature (527978)..(527978): n is a or c or g or t.
  misc_feature (960838)..(960839): n is a or c or g or t.
  misc_feature (960860)..(960861): n is a or c or g or t.
  misc_feature (960872)..(960873): n is a or c or g or t.
  misc_feature (960879)..(960879): n is a or c or g or t.
  misc_feature (960890)..(960890): n is a or c or g or t.
  misc_feature (1250239)..(1250239): n is a or c or g or t.
  misc_feature (1302432)..(1302434): n is a or c or g or t.
  misc_feature (1302471)..(1302471): n is a or c or g or t.
  misc_feature (1302488)..(1302488): n is a or c or g or t.
  misc_feature (1674836)..(1674836): n is a or c or g or t.
MAVRRKLIKERVPTPEVPVEERIKSFVEVNLGYDFASAVKEAERCLQCPVEYAPCIKGCPVHINIPGFISKLVEYRDNPDKAVREALRIIWNDNTLPAVTGRVCPQEDQCEGVCVMGKVGDPINIGKLERFVADYARKHGIEEELLCEFEERCTGELGKVAVVGAGPAGLTAAGELAKMGYKVTIFEALHKPGGVLAYGIPEFRLPKEILDQELAKLKRLGVEIRTDHVVGRTVTIEELLQEYDAVFIGTGAGTPKLLNVPGILLDRIYSANEFLTRVNLMKAYEFPEYDTPIAIGKKTIVIGAGNTAMDAARSALRLGSEVTIAYRRGREDMTARIEEIKHAEEEGVKFEFFLQPVEFIGDENGRVKAVKFEKMRPLDERDARGKRKIVGTGEYVTLEADTVIIAIGLEPNRIITETPGLKTNTNGTLVVDENLMTSIPGVFAGGDAIRGEATVILAMGDGKKAAKAIHEYIQAKRKANA

SEQ ID NO: 1579 - protein, 65 aa, Thermococcus kodakaraensis KOD1
  misc_feature (321437)..(321437): n is a or c or g or t.
  misc_feature (527833)..(527833): n is a or c or g or t.
  misc_feature (527901)..(527901): n is a or c or g or t.
  misc_feature (527978)..(527978): n is a or c or g or t.
  misc_feature (960838)..(960839): n is a or c or g or t.
  misc_feature (960860)..(960861): n is a or c or g or t.
  misc_feature (960872)..(960873): n is a or c or g or t.
  misc_feature (960879)..(960879): n is a or c or g or t.
  misc_feature (960890)..(960890): n is a or c or g or t.
  misc_feature (1250239)..(1250239): n is a or c or g or t.
  misc_feature (1302432)..(1302434): n is a or c or g or t.
  misc_feature (1302471)..(1302471): n is a or c or g or t.
  misc_feature (1302488)..(1302488): n is a or c or g or t.
  misc_feature (1674836)..(1674836): n is a or c or g or t.
MTTYVLWYFKPQYGSYAVFDTNMPTSKLRDLGFDYMIVLHAPGRDGEYGQMPMSGYHSALGWLGR

SEQ ID NO: 1580 - protein, 41 aa, Thermococcus kodakaraensis KOD1
  misc_feature (321437)..(321437): n is a or c or g or t.
  misc_feature (527833)..(527833): n is a or c or g or t.
  misc_feature (527901)..(527901): n is a or c or g or t.
  misc_feature (527978)..(527978): n is a or c or g or t.
  misc_feature (960838)..(960839): n is a or c or g or t.
  misc_feature (960860)..(960861): n is a or c or g or t.
  misc_feature (960872)..(960873): n is a or c or g or t.
  misc_feature (960879)..(960879): n is a or c or g or t.
  misc_feature (960890)..(960890): n is a or c or g or t.
  misc_feature (1250239)..(1250239): n is a or c or g or t.
  misc_feature (1302432)..(1302434): n is a or c or g or t.
  misc_feature (1302471)..(1302471): n is a or c or g or t.
  misc_feature (1302488)..(1302488): n is a or c or g or t.
  misc_feature (1674836)..(1674836): n is a or c or g or t.
VIRALFPVRDTSLEIGSLIGIPTGYYELVPHKVCGDQKPLY

SEQ ID NO: 1581 - protein, 393 aa, Thermococcus kodakaraensis KOD1
  misc_feature (321437)..(321437): n is a or c or g or t.
  misc_feature (527833)..(527833): n is a or c or g or t.
  misc_feature (527901)..(527901): n is a or c or g or t.
  misc_feature (527978)..(527978): n is a or c or g or t.
  misc_feature (960838)..(960839): n is a or c or g or t.
  misc_feature (960860)..(960861): n is a or c or g or t.
  misc_feature (960872)..(960873): n is a or c or g or t.
  misc_feature (960879)..(960879): n is a or c or g or t.
  misc_feature (960890)..(960890): n is a or c or g or t.
  misc_feature (1250239)..(1250239): n is a or c or g or t.
  misc_feature (1302432)..(1302434): n is a or c or g or t.
  misc_feature (1302471)..(1302471): n is a or c or g or t.
  misc_feature (1302488)..(1302488): n is a or c or g or t.
  misc_feature (1674836)..(1674836): n is a or c or g or t.
VRTMRDFYIAHEDDIKAGKTTDVYFIRTQKILREKGIKKRVFADVGTTSLPHGWKWGVLAGIEEVAKLLEGLPVNVYAMPEGTIFHPYEPVLQIEGYYDEFGIYETALLGMLSQASGIATAALRIKIAAKFKPVYSFGIRHMHPAIAPMIDRSAFIGGCDGVSGVLGAEMIGEKPVGTMPHALILTIGDQVKAWKYYDEVMPPEVPRTALVDTLCDEKFEALMAAEALGDRLNAVRLDTPSSRRGNFRKIVEEVRWELDLRGYNHVKIFLSGGLNEESLKELADVADAFGVGSAIASAKPVDFSLDIVEVEGKPITKRGKLSGRKQIYRCENGHYHRVPVEKKLEKCPVCGAKVEPLLKPLIENGKIVAELPKAKEIREYVLEQAKKLNLSID

SEQ ID NO: 1582 - protein, 261 aa, Thermococcus kodakaraensis KOD1
  misc_feature (321437)..(321437): n is a or c or g or t.
  misc_feature (527833)..(527833): n is a or c or g or t.
  misc_feature (527901)..(527901): n is a or c or g or t.
  misc_feature (527978)..(527978): n is a or c or g or t.
  misc_feature (960838)..(960839): n is a or c or g or t.
  misc_feature (960860)..(960861): n is a or c or g or t.
  misc_feature (960872)..(960873): n is a or c or g or t.
  misc_feature (960879)..(960879): n is a or c or g or t.
  misc_feature (960890)..(960890): n is a or c or g or t.
  misc_feature (1250239)..(1250239): n is a or c or g or t.
  misc_feature (1302432)..(1302434): n is a or c or g or t.
  misc_feature (1302471)..(1302471): n is a or c or g or t.
  misc_feature (1302488)..(1302488): n is a or c or g or t.
  misc_feature (1674836)..(1674836): n is a or c or g or t.
MRGTTVTTLSSSVKLWTTPTMRTSSARGASTLRRAFSPTFPGQISSPLRSAFTSRRKGFNFSLLFFTMFLEYQGLRIKLHPQVYEPAEDTFLLAENLAVKVGDIALDMGTGTGIIALLLARKARWVLGVDINPLAVELARENARINGIINVEFRLSDLFENVSGEFDVITFNAPYLPGEPEEPIDLALVGGETGREVLDRFIDEVPCYLKPGGVVQIVQSSITGVEETLKRLEKAGLTAEVVAKRHIFFEDIVLINAYAKE

SEQ ID NO: 1583 - protein, 745 aa, Thermococcus kodakaraensis KOD1
  misc_feature (321437)..(321437): n is a or c or g or t.
  misc_feature (527833)..(527833): n is a or c or g or t.
  misc_feature (527901)..(527901): n is a or c or g or t.
  misc_feature (527978)..(527978): n is a or c or g or t.
  misc_feature (960838)..(960839): n is a or c or g or t.
  misc_feature (960860)..(960861): n is a or c or g or t.
  misc_feature (960872)..(960873): n is a or c or g or t.
  misc_feature (960879)..(960879): n is a or c or g or t.
  misc_feature (960890)..(960890): n is a or c or g or t.
  misc_feature (1250239)..(1250239): n is a or c or g or t.
  misc_feature (1302432)..(1302434): n is a or c or g or t.
  misc_feature (1302471)..(1302471): n is a or c or g or t.
  misc_feature (1302488)..(1302488): n is a or c or g or t.
  misc_feature (1674836)..(1674836): n is a or c or g or t.
MCANSRVLLVILTVMIITAPVASASMLDESVLYLSSAQGYVNNVRDSSLLLMAMASLYGKVENQSTVESSILELVDYLKNAQNSDGGWGYYPNEISNPLDTGYALAALGAVKDLPLKTIDVSGEIKSGVRYLLDSFNGQGWGYGSKTPAEPYLTVVALWGLGANGYTIEDSTVSKAVSYLESINETSPKMVALKLIAYHYIGYANVSALIETAYAMLSGELKPTERAMLTYALTLYTENMTSELPRSLVILESLGSHNETFVLTEPIWPLPELDSVTPTSFAVMAFASLSDVISSEEYPTVSQMCDEILSLQNPDGGWGYTPGEDSRAKPTYYALEFLSLCTPKPQVAIDKATAWAENHLKSAMEEVETEGMLTQDFYYTALILARYSDMPPEERQSVIDFINEYRYSEFAWRGFFSIPQPLQTAMGINLLKAFNITGVNAPASWLLSLTDGGWGLLINYPFTPFTIMSTPDVPTTLLVLEALSDTVDEAKLKPHLDWLLAQRLEDGFWGHYKKSVNILGQVSTASPSIEYTVRALELLIEHGYDLNYFDMASTLLQGIKNSNRIVEKALAFKFAMESGFLPPVLISSVVSKLGSGTWYIHYSPDYASAAEKLSGIIESFGGVPLLKEGDMGRELTGNHIFVGPFGSFDTSVYNPYVNISVAGNYVEINGQKYSKENLVAIIPGRTQDGYVLVLLAEKEVLPAIDLIVNPTMIKYLHGAYVVFSVKDLNGDGAITPDEVKILFEG

SEQ ID NO: 1584 - protein, 204 aa, Thermococcus kodakaraensis KOD1
  misc_feature (321437)..(321437): n is a or c or g or t.
  misc_feature (527833)..(527833): n is a or c or g or t.
  misc_feature (527901)..(527901): n is a or c or g or t.
  misc_feature (527978)..(527978): n is a or c or g or t.
  misc_feature (960838)..(960839): n is a or c or g or t.
  misc_feature (960860)..(960861): n is a or c or g or t.
  misc_feature (960872)..(960873): n is a or c or g or t.
  misc_feature (960879)..(960879): n is a or c or g or t.
  misc_feature (960890)..(960890): n is a or c or g or t.
  misc_feature (1250239)..(1250239): n is a or c or g or t.
  misc_feature (1302432)..(1302434): n is a or c or g or t.
  misc_feature (1302471)..(1302471): n is a or c or g or t.
  misc_feature (1302488)..(1302488): n is a or c or g or t.
  misc_feature (1674836)..(1674836): n is a or c or g or t.
MSIVKDSVEAALDLDEKSVYSHIAHESAEDIIRIISSIDAERARLRGEVIYYTDDWDDLIRQRIAKGKRHTAFDFYNPALLDIWEAKVKKVKTLKKAEKTAYALYGAVIAVSTGLLVLSGSLVILPVLSIAPLVLFLRWWIRDRMDLSYYELTQLFIDEMAELVRRHGLRPENYRFKLFGNDYFGVKTFNQRSGTFVVEVEGND

SEQ ID NO: 1585 - protein, 170 aa, Thermococcus kodakaraensis KOD1
  misc_feature (321437)..(321437): n is a or c or g or t.
  misc_feature (527833)..(527833): n is a or c or g or t.
  misc_feature (527901)..(527901): n is a or c or g or t.
  misc_feature (527978)..(527978): n is a or c or g or t.
  misc_feature (960838)..(960839): n is a or c or g or t.
  misc_feature (960860)..(960861): n is a or c or g or t.
  misc_feature (960872)..(960873): n is a or c or g or t.
  misc_feature (960879)..(960879): n is a or c or g or t.
  misc_feature (960890)..(960890): n is a or c or g or t.
  misc_feature (1250239)..(1250239): n is a or c or g or t.
  misc_feature (1302432)..(1302434): n is a or c or g or t.
  misc_feature (1302471)..(1302471): n is a or c or g or t.
  misc_feature (1302488)..(1302488): n is a or c or g or t.
  misc_feature (1674836)..(1674836): n is a or c or g or t.
VPLMSALRSRGQTALEMLFIMAVIFMGVVVILPSYMQNNSEVSVLAGIRSVASDVASYVSVGVIAENRTEFDCLNDNITAYYDYLSGRFVFEGLKVQNETEDSMTVLVKFKTLGESNSTVDKELVGAVGEAMVESLKEIRGFGERDGKLYYGGIEVVLNVSVNDEWGEFP

SEQ ID NO: 1586 - protein, 571 aa, Thermococcus kodakaraensis KOD1
  misc_feature (321437)..(321437): n is a or c or g or t.
  misc_feature (527833)..(527833): n is a or c or g or t.
  misc_feature (527901)..(527901): n is a or c or g or t.
  misc_feature (527978)..(527978): n is a or c or g or t.
  misc_feature (960838)..(960839): n is a or c or g or t.
  misc_feature (960860)..(960861): n is a or c or g or t.
  misc_feature (960872)..(960873): n is a or c or g or t.
  misc_feature (960879)..(960879): n is a or c or g or t.
  misc_feature (960890)..(960890): n is a or c or g or t.
  misc_feature (1250239)..(1250239): n is a or c or g or t.
  misc_feature (1302432)..(1302434): n is a or c or g or t.
  misc_feature (1302471)..(1302471): n is a or c or g or t.
  misc_feature (1302488)..(1302488): n is a or c or g or t.
  misc_feature (1674836)..(1674836): n is a or c or g or t.
VTKILFEYPSGDQLGIVLNSGVYVEITRKWKRSWLGGHWVISSSKAYTRTARIIRGVYAEIIPGYSCRDEDYYNNNNIDIKFDIDLPSDTRPRYGVLSVYTRQDGNVFDVIKFNNKTWKNSEGNLTIPLSSIWPETNTVYLKVSRYDDSREVGLGSGSWVDLGYVTSTPHADDPGLIKLYDVTSKGTGIYYLNSIFVPGNVTGIEMNLTFSGVHEVRVYYSNGTVLNLIYENTSIIGNNLYISNSTIMRGLLRYTTLESLSRKNFNLVIMLDAEYGLDSVLYAGQDYHREWNNKRILYGYPYSWIRISYNPTVTGSRFYIPIEETHDLESLDDTEMHFSYYLPGKAIPWYVDVWTGIIYTPGLIDTSNNITLSEGPDQTEFLSFPLDVYLIRVAYTKISKDIMVNGSINKFKIESTDDYYTFRPAVSRAIVHYFLNGYAPYGKVFTYYAQDNACGYNLTYWYDLTGNGDGTRDSVIVGNCKPSDTPLKKSVEDLDPSKYALDDAIVRLFLQLGADERLWKEHLGDSRYIPGGSKNPIRIRLVGIEGKAIGIRNVPTSIEPITVTLRIWRGG

SEQ ID NO: 1587 - protein, 31 aa, Thermococcus kodakaraensis KOD1
  misc_feature (321437)..(321437): n is a or c or g or t.
  misc_feature (527833)..(527833): n is a or c or g or t.
  misc_feature (527901)..(527901): n is a or c or g or t.
  misc_feature (527978)..(527978): n is a or c or g or t.
  misc_feature (960838)..(960839): n is a or c or g or t.
  misc_feature (960860)..(960861): n is a or c or g or t.
  misc_feature (960872)..(960873): n is a or c or g or t.
  misc_feature (960879)..(960879): n is a or c or g or t.
  misc_feature (960890)..(960890): n is a or c or g or t.
  misc_feature (1250239)..(1250239): n is a or c or g or t.
  misc_feature (1302432)..(1302434): n is a or c or g or t.
  misc_feature (1302471)..(1302471): n is a or c or g or t.
  misc_feature (1302488)..(1302488): n is a or c or g or t.
  misc_feature (1674836)..(1674836): n is a or c or g or t.
MLPERLLVLNSDGSNSIIILKRPYLIMHPGE

SEQ ID NO: 1588 - protein, 216 aa, Thermococcus kodakaraensis KOD1
  misc_feature (321437)..(321437): n is a or c or g or t.
  misc_feature (527833)..(527833): n is a or c or g or t.
  misc_feature (527901)..(527901): n is a or c or g or t.
  misc_feature (527978)..(527978): n is a or c or g or t.
  misc_feature (960838)..(960839): n is a or c or g or t.
  misc_feature (960860)..(960861): n is a or c or g or t.
  misc_feature (960872)..(960873): n is a or c or g or t.
  misc_feature (960879)..(960879): n is a or c or g or t.
  misc_feature (960890)..(960890): n is a or c or g or t.
  misc_feature (1250239)..(1250239): n is a or c or g or t.
  misc_feature (1302432)..(1302434): n is a or c or g or t.
  misc_feature (1302471)..(1302471): n is a or c or g or t.
  misc_feature (1302488)..(1302488): n is a or c or g or t.
  misc_feature (1674836)..(1674836): n is a or c or g or t.
MLEVVEFLKYLILLYGGLFAITNPVGAVPVFLSVTHDLSWRERREIASKTAISVVATLVVFALLGQWIFKFFGSSTDAFAIAGGILLFRMALDMLSGKLSSVKISNEETEEFSEEVVTLEEVAIIPLAIPLISGPGAITTVMLYMAKSTTNLQRFAVILTIILIGITVWFVLCSANRIKARLGRVGIKVMTRMMGLILTSMAVQMIINGIKGAFGL

SEQ ID NO: 1589 - protein, 73 aa, Thermococcus kodakaraensis KOD1
  misc_feature (321437)..(321437): n is a or c or g or t.
  misc_feature (527833)..(527833): n is a or c or g or t.
  misc_feature (527901)..(527901): n is a or c or g or t.
  misc_feature (527978)..(527978): n is a or c or g or t.
  misc_feature (960838)..(960839): n is a or c or g or t.
  misc_feature (960860)..(960861): n is a or c or g or t.
  misc_feature (960872)..(960873): n is a or c or g or t.
  misc_feature (960879)..(960879): n is a or c or g or t.
  misc_feature (960890)..(960890): n is a or c or g or t.
  misc_feature (1250239)..(1250239): n is a or c or g or t.
  misc_feature (1302432)..(1302434): n is a or c or g or t.
  misc_feature (1302471)..(1302471): n is a or c or g or t.
  misc_feature (1302488)..(1302488): n is a or c or g or t.
  misc_feature (1674836)..(1674836): n is a or c or g or t.
VVPMFMAEFKLRFGDRKWYVRRIIEAESLEEAEEKARRYAELMNKGEVTWELSYVIESKRPLIVGDDELKKLA

SEQ ID NO: 1590 - protein, 148 aa, Thermococcus kodakaraensis KOD1
  misc_feature (321437)..(321437): n is a or c or g or t.
  misc_feature (527833)..(527833): n is a or c or g or t.
  misc_feature (527901)..(527901): n is a or c or g or t.
  misc_feature (527978)..(527978): n is a or c or g or t.
  misc_feature (960838)..(960839): n is a or c or g or t.
  misc_feature (960860)..(960861): n is a or c or g or t.
  misc_feature (960872)..(960873): n is a or c or g or t.
  misc_feature (960879)..(960879): n is a or c or g or t.
  misc_feature (960890)..(960890): n is a or c or g or t.
  misc_feature (1250239)..(1250239): n is a or c or g or t.
  misc_feature (1302432)..(1302434): n is a or c or g or t.
  misc_feature (1302471)..(1302471): n is a or c or g or t.
  misc_feature (1302488)..(1302488): n is a or c or g or t.
  misc_feature (1674836)..(1674836): n is a or c or g or t.
VIYIDTNVLYSYLFETPISENAERILELPEKVTSKVAINEAVYVVFRRLARDKGITNVYEAKKFAKLKEGQYLLEQAYSTVMELVQLSGITVVEEEDDFEILKDISREYGLLPNDAIIVATCVKHGITKIATFDSDFDNVPFLKIVRG

SEQ ID NO: 1591 - protein, 139 aa, Thermococcus kodakaraensis KOD1
  misc_feature (321437)..(321437): n is a or c or g or t.
  misc_feature (527833)..(527833): n is a or c or g or t.
  misc_feature (527901)..(527901): n is a or c or g or t.
  misc_feature (527978)..(527978): n is a or c or g or t.
  misc_feature (960838)..(960839): n is a or c or g or t.
  misc_feature (960860)..(960861): n is a or c or g or t.
  misc_feature (960872)..(960873): n is a or c or g or t.
  misc_feature (960879)..(960879): n is a or c or g or t.
  misc_feature (960890)..(960890): n is a or c or g or t.
  misc_feature (1250239)..(1250239): n is a or c or g or t.
  misc_feature (1302432)..(1302434): n is a or c or g or t.
  misc_feature (1302471)..(1302471): n is a or c or g or t.
  misc_feature (1302488)..(1302488): n is a or c or g or t.
  misc_feature (1674836)..(1674836): n is a or c or g or t.
MPKSTSQGRSWRGSSNFLSSSGIARLTSTEVMGMDFRELERIVVEFRDARSWKKYHTPKNLAISAVVELGELFEHFQWLSDEEILEAVKNPQKKEEVADEIADVIIYLVLLAHELGIDLDEAVGRKIRKNEAKYPLPGD

SEQ ID NO: 1592 - protein, 260 aa, Thermococcus kodakaraensis KOD1
  misc_feature (321437)..(321437): n is a or c or g or t.
  misc_feature (527833)..(527833): n is a or c or g or t.
  misc_feature (527901)..(527901): n is a or c or g or t.
  misc_feature (527978)..(527978): n is a or c or g or t.
  misc_feature (960838)..(960839): n is a or c or g or t.
  misc_feature (960860)..(960861): n is a or c or g or t.
  misc_feature (960872)..(960873): n is a or c or g or t.
  misc_feature (960879)..(960879): n is a or c or g or t.
  misc_feature (960890)..(960890): n is a or c or g or t.
  misc_feature (1250239)..(1250239): n is a or c or g or t.
  misc_feature (1302432)..(1302434): n is a or c or g or t.
  misc_feature (1302471)..(1302471): n is a or c or g or t.
  misc_feature (1302488)..(1302488): n is a or c or g or t.
  misc_feature (1674836)..(1674836): n is a or c or g or t.
MAFVPPQAGYDRAITVFSPDGRLFQVNYAREAVKRGATAVGVKWKDGVVLAVEKRITSKLIEPSSYEKIFLIDDHIAAAPSGIIADARVLVDRARLEAQIYRLTYGEPVPLTVLVKKICDLKQAHTQYGGVRPFGAALLMAGVNEKPELFETDPSGAYFEWKAVAIGSGRNTAMAIFEEHYRDDIGKDDAIKLAILALAKTLEEPTAEGIEVAYITMDEKRWKKLPREELEKYINEILQEVKEEEVEEKQEDYSELDQNY

SEQ ID NO: 1593 - protein, 272 aa, Thermococcus kodakaraensis KOD1
  misc_feature (321437)..(321437): n is a or c or g or t.
  misc_feature (527833)..(527833): n is a or c or g or t.
  misc_feature (527901)..(527901): n is a or c or g or t.
  misc_feature (527978)..(527978): n is a or c or g or t.
  misc_feature (960838)..(960839): n is a or c or g or t.
  misc_feature (960860)..(960861): n is a or c or g or t.
  misc_feature (960872)..(960873): n is a or c or g or t.
  misc_feature (960879)..(960879): n is a or c or g or t.
  misc_feature (960890)..(960890): n is a or c or g or t.
  misc_feature (1250239)..(1250239): n is a or c or g or t.
  misc_feature (1302432)..(1302434): n is a or c or g or t.
  misc_feature (1302471)..(1302471): n is a or c or g or t.
  misc_feature (1302488)..(1302488): n is a or c or g or t.
  misc_feature (1674836)..(1674836): n is a or c or g or t.
MSEMEVMASIMRDHIIELLREGKRIDGRSFEDYRDLEIKVNVIEKAEGSAWVRLGDTQVLVGIKAELGEPFPDLPDRGVITTNVELVPLASPTFEPGPPDENAIELARVVDRGIRESQAVDLEKLVIVPGKLVRVIFIDVHVLDHGGNLLDASGIGAIAALLSTKLPKVNYNEETGEVEILDEYEPLPVNHVPIPVTFAKIGNSIVVDPSLDEERVMDGRLTITTDETGHISAAQKGEAGAFKMEEVMYALEVALKKGNEIREKVLKAVGRA

SEQ ID NO: 1594 - protein, 237 aa, Thermococcus kodakaraensis KOD1
  misc_feature (321437)..(321437): n is a or c or g or t.
  misc_feature (527833)..(527833): n is a or c or g or t.
  misc_feature (527901)..(527901): n is a or c or g or t.
  misc_feature (527978)..(527978): n is a or c or g or t.
  misc_feature (960838)..(960839): n is a or c or g or t.
  misc_feature (960860)..(960861): n is a or c or g or t.
  misc_feature (960872)..(960873): n is a or c or g or t.
  misc_feature (960879)..(960879): n is a or c or g or t.
  misc_feature (960890)..(960890): n is a or c or g or t.
  misc_feature (1250239)..(1250239): n is a or c or g or t.
  misc_feature (1302432)..(1302434): n is a or c or g or t.
  misc_feature (1302471)..(1302471): n is a or c or g or t.
  misc_feature (1302488)..(1302488): n is a or c or g or t.
  misc_feature (1674836)..(1674836): n is a or c or g or t.
VMLMGENGEKRQKVEVREDLGEVQVISLGDCPICGGKGTLKAIQHIHEIPYFGKVMESTIICEKCGYRNADVMILEDRPPKLYTVKVEGEKDLFTRVVRSKSGTIELDEIGVKIEPGPASEGFITNVEGVLERVRETLLMAREFRRQEGDEEAVKKADEILQYIEDVKEGKKPITVRIMDPLGNSALIGEKVKSRLLTEEEINKLSLGPYVLVPEVEEEDALEEEKKDTGEGNSDGS

SEQ ID NO: 1595 - protein, 170 aa, Thermococcus kodakaraensis KOD1
  misc_feature (321437)..(321437): n is a or c or g or t.
  misc_feature (527833)..(527833): n is a or c or g or t.
  misc_feature (527901)..(527901): n is a or c or g or t.
  misc_feature (527978)..(527978): n is a or c or g or t.
  misc_feature (960838)..(960839): n is a or c or g or t.
  misc_feature (960860)..(960861): n is a or c or g or t.
  misc_feature (960872)..(960873): n is a or c or g or t.
  misc_feature (960879)..(960879): n is a or c or g or t.
  misc_feature (960890)..(960890): n is a or c or g or t.
  misc_feature (1250239)..(1250239): n is a or c or g or t.
  misc_feature (1302432)..(1302434): n is a or c or g or t.
  misc_feature (1302471)..(1302471): n is a or c or g or t.
  misc_feature (1302488)..(1302488): n is a or c or g or t.
  misc_feature (1674836)..(1674836): n is a or c or g or t.
MLIGIMSDTHDNLPAIRKAVEFFNERNVDLVIHAGDYVAPFVARELKKLKAPLKGVFGNNDGERKGLYEALGIYDELIELEADGMKIAVTHGTNEVLVKALAHSRLYDVVVVGHTHRYEIQEVGRTVLVNPGEVCGYVTGVKSVALLDTRKREVQIINIDNGELLGAMSL

SEQ ID NO: 1596 - protein, 343 aa, Thermococcus kodakaraensis KOD1
  misc_feature (321437)..(321437): n is a or c or g or t.
  misc_feature (527833)..(527833): n is a or c or g or t.
  misc_feature (527901)..(527901): n is a or c or g or t.
  misc_feature (527978)..(527978): n is a or c or g or t.
  misc_feature (960838)..(960839): n is a or c or g or t.
  misc_feature (960860)..(960861): n is a or c or g or t.
  misc_feature (960872)..(960873): n is a or c or g or t.
  misc_feature (960879)..(960879): n is a or c or g or t.
  misc_feature (960890)..(960890): n is a or c or g or t.
  misc_feature (1250239)..(1250239): n is a or c or g or t.
  misc_feature (1302432)..(1302434): n is a or c or g or t.
  misc_feature (1302471)..(1302471): n is a or c or g or t.
  misc_feature (1302488)..(1302488): n is a or c or g or t.
  misc_feature (1674836)..(1674836): n is a or c or g or t.
MEWVEIDGSYGEGGGQILRTSVALSVITGKPVRIYNIRANRPNPGLRPQHLHGILALKELSNAKIKGASVGSTELEFIPGKAEPKHVRVPIKTAGSITLVLQALLPAMAFIGGSFEITGGTDVPWSPPVDYLKHVTLYALEKMGIKVELEIKRRGHYPRGGGLVVGRIEPWEEKKPLKALKWERIEWFAGISHATNLPAHVAERQAKAARERLSEVYSAPVEIETEVSRSLGPGSGIVVWAETDKLRLGGDALGKRGKPAEVVGREAADELIEALKTGMAADRFLGDQLIPFLAFAGGEVGVSEITNHLVTNVWVVEKFFGNVFEVEGEVGKPGTLRVVKSVL

SEQ ID NO: 1597 - protein, 600 aa, Thermococcus kodakaraensis KOD1
  misc_feature (321437)..(321437): n is a or c or g or t.
  misc_feature (527833)..(527833): n is a or c or g or t.
  misc_feature (527901)..(527901): n is a or c or g or t.
  misc_feature (527978)..(527978): n is a or c or g or t.
  misc_feature (960838)..(960839): n is a or c or g or t.
  misc_feature (960860)..(960861): n is a or c or g or t.
  misc_feature (960872)..(960873): n is a or c or g or t.
  misc_feature (960879)..(960879): n is a or c or g or t.
  misc_feature (960890)..(960890): n is a or c or g or t.
  misc_feature (1250239)..(1250239): n is a or c or g or t.
  misc_feature (1302432)..(1302434): n is a or c or g or t.
  misc_feature (1302471)..(1302471): n is a or c or g or t.
  misc_feature (1302488)..(1302488): n is a or c or g or t.
  misc_feature (1674836)..(1674836): n is a or c or g or t.
MSEIKAIAVGMNSCGIAAGARETYEAIKAELEKRNLNIKLKIVGCVGMCYREPLVDIITEDEIITYGHVDPKKVPRIIEEHVINGRPIKEWIVKRDWWENGERKTWDVDGYFAKQKKIVLENSGYIDPENIDEYIQAGGYEALKKALKMDPEEIIEIITKSGLRGRGGAGFPTGLKWKFTRQAPGDEKYVICNADEGDPGAFMDRNVLEGDPHRVIEGMIIGAYAIGATKGFIYVRAEYPLAIRRLKIALKQARERGFLGENILGSGFSFDIVIKEGAGAFVCGEETALIASIEGKRGMPRPRPPYPAQKGLWGKPTNINNVETWANVPWIIRHGWEAYASLGTEKSKGTKVFALSGKIKHGGNVEVPMGITLREILYEIGGGTKTGKRIKAVQLGGPSGGCIPEELFDTPVDYESVNATGAIMGSGGMVVMDEDTCMVDVAKFFLDFTVKESCGKCTFCRIGTKRMWEILDRFTRGEATEEDLEKLERLAYQVKAGSLCGLGQTAPNPVLTTLRYFREEYIEHINGRCPAKVCKPLIRYVIITDKCTGCTACAIFCPANAISGERLKPHFIDQEACIKCGTCYEVCRFNAIEILTGREE

SEQ ID NO: 1598 - protein, 348 aa, Thermococcus kodakaraensis KOD1
  misc_feature (321437)..(321437): n is a or c or g or t.
  misc_feature (527833)..(527833): n is a or c or g or t.
  misc_feature (527901)..(527901): n is a or c or g or t.
  misc_feature (527978)..(527978): n is a or c or g or t.
  misc_feature (960838)..(960839): n is a or c or g or t.
  misc_feature (960860)..(960861): n is a or c or g or t.
  misc_feature (960872)..(960873): n is a or c or g or t.
  misc_feature (960879)..(960879): n is a or c or g or t.
  misc_feature (960890)..(960890): n is a or c or g or t.
  misc_feature (1250239)..(1250239): n is a or c or g or t.
  misc_feature (1302432)..(1302434): n is a or c or g or t.
  misc_feature (1302471)..(1302471): n is a or c or g or t.
  misc_feature (1302488)..(1302488): n is a or c or g or t.
  misc_feature (1674836)..(1674836): n is a or c or g or t.
MIGAIAEKEFRDNLTSKRFFVVFGFLLAVVVLSLILVKLDLYGMYMPGGDDEAPKVYHVLWGVNYLIGSVGGIFALALGFDAVTKEKENRTMNVLMGHPVFRDQVILGKILGGAITLAVSVLITALIMTGLLLWIGVTIDSYARMVMYFLVMYLYFMVFFTMGVAFSAHSSSSGSALMYALVAFLILTTLTLPVAELVAYGVAGPRPQEPEELRAYYEEMERIFSSENVTPEDMAKMEDIQKKMEVLQEEYSQKIEEWSKKYWKTIEYVQIISPEYDFDQVSEYVLNPEKGSEDWFVYYDRDFDEEEPPSYSLSESLSFVKKELGMMVAYLVLWTVIAYLGFVRAEIR

SEQ ID NO: 1599 - protein, 261 aa, Thermococcus kodakaraensis KOD1
  misc_feature (321437)..(321437): n is a or c or g or t.
  misc_feature (527833)..(527833): n is a or c or g or t.
  misc_feature (527901)..(527901): n is a or c or g or t.
  misc_feature (527978)..(527978): n is a or c or g or t.
  misc_feature (960838)..(960839): n is a or c or g or t.
  misc_feature (960860)..(960861): n is a or c or g or t.
  misc_feature (960872)..(960873): n is a or c or g or t.
  misc_feature (960879)..(960879): n is a or c or g or t.
  misc_feature (960890)..(960890): n is a or c or g or t.
  misc_feature (1250239)..(1250239): n is a or c or g or t.
  misc_feature (1302432)..(1302434): n is a or c or g or t.
  misc_feature (1302471)..(1302471): n is a or c or g or t.
  misc_feature (1302488)..(1302488): n is a or c or g or t.
  misc_feature (1674836)..(1674836): n is a or c or g or t.
VMWKVFALLSFILVVVLSVIIVRIGAIALELTGLSRDVAAFQAQSAYSGTGFTTSESEYVVSHPVRRKIIRLLIFLGSAGITSAIATLVLTFVGKSRGEALNSLVILVVSLVFLYVFFTSKRVERWMRRVIKRFLEKRFPELKVYDYNQLLGLSRGYSISRIQVKRNSWLANKTLRELELDKEGVLVLGIFRKTPEGEKYLGAPRGDTQVLPGDILICYGPEEALLNLSKRVRGIKGDKEHEEAVKKAELKRMEEEMLSGS

SEQ ID NO: 1600 - protein, 468 aa, Thermococcus kodakaraensis KOD1
  misc_feature (321437)..(321437): n is a or c or g or t.
  misc_feature (527833)..(527833): n is a or c or g or t.
  misc_feature (527901)..(527901): n is a or c or g or t.
  misc_feature (527978)..(527978): n is a or c or g or t.
  misc_feature (960838)..(960839): n is a or c or g or t.
  misc_feature (960860)..(960861): n is a or c or g or t.
  misc_feature (960872)..(960873): n is a or c or g or t.
  misc_feature (960879)..(960879): n is a or c or g or t.
  misc_feature (960890)..(960890): n is a or c or g or t.
  misc_feature (1250239)..(1250239): n is a or c or g or t.
  misc_feature (1302432)..(1302434): n is a or c or g or t.
  misc_feature (1302471)..(1302471): n is a or c or g or t.
  misc_feature (1302488)..(1302488): n is a or c or g or t.
  misc_feature (1674836)..(1674836): n is a or c or g or t.
VNIMRFIDRERELEVLRKARERSRKKLYTLAIYGLRRVGKTRLLREFLGEKDIYFFVNREKGSTGLLREYENILREKGVITKRERIESWDDFFEVLFERFEGVVAFDEFQDFRFVEPSVYPTLQRLIDENEERKNLLLIFTGSTIGMIEKLFRDSKEPLYGRIKREIHLKPLDIRGSYEMARELDIVKLDDFFKVHSVFGGFPRYWVAIEDEGLEGRSAEEILRELFFEEYAPLAEEVPKMLSLEFGKRSGVYYDILEAIANGATSISGIAGYLNRDETSLTRQLRELVYYFRLVDYDRAVLGKRSILHISHPLIAFWFRFVQPKLSMYEFERRKVWEEVKKGLGDYMGKRFDFACRELVLLEELPFRPATIGRHWGYYREDGVKKVYEIDVVALDETGKRAIFGECKWRNRAQNGKKLVEELRKNVELTGWKGEAHYLLIGKSFKHVPEGVKVIDEDRIRELLEGSE

SEQ ID NO: 1601 - protein, 354 aa, Thermococcus kodakaraensis KOD1
  misc_feature (321437)..(321437): n is a or c or g or t.
  misc_feature (527833)..(527833): n is a or c or g or t.
  misc_feature (527901)..(527901): n is a or c or g or t.
  misc_feature (527978)..(527978): n is a or c or g or t.
  misc_feature (960838)..(960839): n is a or c or g or t.
  misc_feature (960860)..(960861): n is a or c or g or t.
  misc_feature (960872)..(960873): n is a or c or g or t.
  misc_feature (960879)..(960879): n is a or c or g or t.
  misc_feature (960890)..(960890): n is a or c or g or t.
  misc_feature (1250239)..(1250239): n is a or c or g or t.
  misc_feature (1302432)..(1302434): n is a or c or g or t.
  misc_feature (1302471)..(1302471): n is a or c or g or t.
  misc_feature (1302488)..(1302488): n is a or c or g or t.
  misc_feature (1674836)..(1674836): n is a or c or g or t.
MVTGRSSTKKTGLLYRVQELLKKAGVESIVFDRVIPNPISTHVDEAAELARRENVDFVVGLGGGSAIDSAKAIAMTAKSGGKYWDYVPAVGGGKKPSGALPIVAIPTTHGTGTEADPYAVITNPETKEKQGIGYDVLFPKFSIVDPEVMVTLPQNQTVYTSMDAFYHSIEAFLNVRAQPYSDVLALDSMRRVVTYLPIAYENLQDLEARTQLAWASTEAGITETLTGVIANHALEHGLSGFYPEVPHGLGLCILGPYLFEYILDHAYERLAIVGREVFGVYESNDRKAAELAVKKLRDFQSLFGVNKKLRELGVKEEDIPKMAETAYRMMKGVIDVTPGNLSVEDLEEIYRRAY

SEQ ID NO: 1602 - protein, 218 aa, Thermococcus kodakaraensis KOD1
  misc_feature (321437)..(321437): n is a or c or g or t.
  misc_feature (527833)..(527833): n is a or c or g or t.
  misc_feature (527901)..(527901): n is a or c or g or t.
  misc_feature (527978)..(527978): n is a or c or g or t.
  misc_feature (960838)..(960839): n is a or c or g or t.
  misc_feature (960860)..(960861): n is a or c or g or t.
  misc_feature (960872)..(960873): n is a or c or g or t.
  misc_feature (960879)..(960879): n is a or c or g or t.
  misc_feature (960890)..(960890): n is a or c or g or t.
  misc_feature (1250239)..(1250239): n is a or c or g or t.
  misc_feature (1302432)..(1302434): n is a or c or g or t.
  misc_feature (1302471)..(1302471): n is a or c or g or t.
  misc_feature (1302488)..(1302488): n is a or c or g or t.
  misc_feature (1674836)..(1674836): n is a or c or g or t.
VGGSKDSVGDFTIQNFYKSDGQLSLGFNLRSFGGESMGLRPAKIDRDVDKPAYTRREYIRGAPGPKITIFDMGNLSAEFEYEVSLHAEQAMQIRQNALEAIRIQVNRYLQKNVGRSNYHFKIRVYPFQVLRENPMATGRKADRYGNGMRRPFGKPIGLAARVRKDQKILTVWVNGQHLKFALGAMHRAKMKLPYSAYYRIYDKEGNDVTTKVLSTMKL

SEQ ID NO: 1603 - protein, 255 aa, Thermococcus kodakaraensis KOD1 [sequence omitted]

SEQ ID NO: 1604 - protein, 86 aa, Thermococcus kodakaraensis KOD1
  misc_feature (321437)..(321437): n is a or c or g or t.
  misc_feature (527833)..(527833): n is a or c or g or t.
  misc_feature (527901)..(527901): n is a or c or g or t.
  misc_feature (527978)..(527978): n is a or c or g or t.
  misc_feature (960838)..(960839): n is a or c or g or t.
  misc_feature (960860)..(960861): n is a or c or g or t.
  misc_feature (960872)..(960873): n is a or c or g or t.
  misc_feature (960879)..(960879): n is a or c or g or t.
  misc_feature (960890)..(960890): n is a or c or g or t.
  misc_feature (1250239)..(1250239): n is a or c or g or t.
  misc_feature (1302432)..(1302434): n is a or c or g or t.
  misc_feature (1302471)..(1302471): n is a or c or g or t.
  misc_feature (1302488)..(1302488): n is a or c or g or t.
  misc_feature (1674836)..(1674836): n is a or c or g or t.
MDPYKVIIRPLVTEKAVSLIERENKLTFIVDRRATKQDIKRAVEEMFNVKVAKVNTLVTMKGEKKAYVKLKPEYDASEIAARLGLF

SEQ ID NO: 1605 - protein, 136 aa, Thermococcus kodakaraensis KOD1
  misc_feature (321437)..(321437): n is a or c or g or t.
  misc_feature (527833)..(527833): n is a or c or g or t.
  misc_feature (527901)..(527901): n is a or c or g or t.
  misc_feature (527978)..(527978): n is a or c or g or t.
  misc_feature (960838)..(960839): n is a or c or g or t.
  misc_feature (960860)..(960861): n is a or c or g or t.
  misc_feature (960872)..(960873): n is a or c or g or t.
  misc_feature (960879)..(960879): n is a or c or g or t.
  misc_feature (960890)..(960890): n is a or c or g or t.
  misc_feature (1250239)..(1250239): n is a or c or g or t.
  misc_feature (1302432)..(1302434): n is a or c or g or t.
  misc_feature (1302471)..(1302471): n is a or c or g or t.
  misc_feature (1302488)..(1302488): n is a or c or g or t.
  misc_feature (1674836)..(1674836): n is a or c or g or t.
VMKMARKKEFRYRGYTLDELLNMSLEEFAKLLPSRQRRSLKRGLSPEQKKLLRKIRLAKKGKYNKPIRTHSRDMIVLPEMVGMTIHVYNGKEFVPVEIKEEMIGHYLGEFAMTRKVVQHGSPGVGATRSSMFVAVK

SEQ ID NO: 1606 - protein, 212 aa, Thermococcus kodakaraensis KOD1
  misc_feature (321437)..(321437): n is a or c or g or t.
  misc_feature (527833)..(527833): n is a or c or g or t.
  misc_feature (527901)..(527901): n is a or c or g or t.
  misc_feature (527978)..(527978): n is a or c or g or t.
  misc_feature (960838)..(960839): n is a or c or g or t.
  misc_feature (960860)..(960861): n is a or c or g or t.
  misc_feature (960872)..(960873): n is a or c or g or t.
  misc_feature (960879)..(960879): n is a or c or g or t.
  misc_feature (960890)..(960890): n is a or c or g or t.
  misc_feature (1250239)..(1250239): n is a or c or g or t.
  misc_feature (1302432)..(1302434): n is a or c or g or t.
  misc_feature (1302471)..(1302471): n is a or c or g or t.
  misc_feature (1302488)..(1302488): n is a or c or g or t.
  misc_feature (1674836)..(1674836): n is a or c or g or t.
VRPLAIERYFIKEGVKEMLIDEFLEKELRRAGYGGLDIKKTPLGTKVTIFAANPGYVIGRGGRRIRELTRILEKQFGLENPQIEVEEIKNPYLNAKVQAVRLAQALERGIHFRRAAYSAIRAIMRNGARGVEIRLSGKLTGERAKSVRFYQGYLAKVGNPAETLVSRGYAQAQLKLGVIGVKVSIMPPDAKLPDEIEIKEIVEEEVSANEAQ

SEQ ID NO: 1607 - protein, 88 aa, Thermococcus kodakaraensis KOD1
  misc_feature (321437)..(321437): n is a or c or g or t.
  misc_feature (527833)..(527833): n is a or c or g or t.
  misc_feature (527901)..(527901): n is a or c or g or t.
  misc_feature (527978)..(527978): n is a or c or g or t.
  misc_feature (960838)..(960839): n is a or c or g or t.
  misc_feature (960860)..(960861): n is a or c or g or t.
  misc_feature (960872)..(960873): n is a or c or g or t.
  misc_feature (960879)..(960879): n is a or c or g or t.
  misc_feature (960890)..(960890): n is a or c or g or t.
  misc_feature (1250239)..(1250239): n is a or c or g or t.
  misc_feature (1302432)..(1302434): n is a or c or g or t.
  misc_feature (1302471)..(1302471): n is a or c or g or t.
  misc_feature (1302488)..(1302488): n is a or c or g or t.
  misc_feature (1674836)..(1674836): n is a or c or g or t.
VTRKNIIWHELIGLKAKVIRASHPELVGIEGYVLDETRNTLVLVGDRVWVVPKDVVEIEFDLGNEKIRVNGKDLVGRPEMRLKKRWRK

SEQ ID NO: 1608 - protein, 243 aa, Thermococcus kodakaraensis KOD1
  misc_feature (321437)..(321437): n is a or c or g or t.
  misc_feature (527833)..(527833): n is a or c or g or t.
  misc_feature (527901)..(527901): n is a or c or g or t.
  misc_feature (527978)..(527978): n is a or c or g or t.
  misc_feature (960838)..(960839): n is a or c or g or t.
  misc_feature (960860)..(960861): n is a or c or g or t.
  misc_feature (960872)..(960873): n is a or c or g or t.
  misc_feature (960879)..(960879): n is a or c or g or t.
  misc_feature (960890)..(960890): n is a or c or g or t.
  misc_feature (1250239)..(1250239): n is a or c or g or t.
  misc_feature (1302432)..(1302434): n is a or c or g or t.
  misc_feature (1302471)..(1302471): n is a or c or g or t.
  misc_feature (1302488)..(1302488): n is a or c or g or t.
  misc_feature (1674836)..(1674836): n is a or c or g or t.
MARKGPKRHLKRLAAPTSWYIHRKAYKWAVRPSPGPHSMKTSIPLIYIVRDYLGYAKTAREARKILNEGKILVDGRVRKDYKFPVGIMDVVSIPETGEHYRVLPNRIGKLILHPISEEEAKLKPFRINNKRMVKGAKVQLNLHDGSNHLVSLAEKDAYKTSYTVIMQVPERQIVKVLPFEVGAYVFVTQGKNVARKGKIVEVRQFPMGWPDVVTIEDENGELFDTLKEYAFVIGKDKPEISLP

SEQ ID NO: 1609 - protein, 126 aa, Thermococcus kodakaraensis KOD1
  misc_feature (321437)..(321437): n is a or c or g or t.
  misc_feature (527833)..(527833): n is a or c or g or t.
  misc_feature (527901)..(527901): n is a or c or g or t.
  misc_feature (527978)..(527978): n is a or c or g or t.
  misc_feature (960838)..(960839): n is a or c or g or t.
  misc_feature (960860)..(960861): n is a or c or g or t.
  misc_feature (960872)..(960873): n is a or c or g or t.
  misc_feature (960879)..(960879): n is a or c or g or t.
  misc_feature (960890)..(960890): n is a or c or g or t.
  misc_feature (1250239)..(1250239): n is a or c or g or t.
  misc_feature (1302432)..(1302434): n is a or c or g or t.
  misc_feature (1302471)..(1302471): n is a or c or g or t.
  misc_feature (1302488)..(1302488): n is a or c or g or t.
  misc_feature (1674836)..(1674836): n is a or c or g or t.
MNEKARLLRIRAKLKRKKPRFLRQEWWRYPKFKNDPKWRRPKGIDSKMRLKKKGKPRSPSIGWSSPKAVRGLHPSGYEEVLVHNVKELEAIDPTRQAARIAGTVGARKREMILARAKELGVKVLNP

SEQ ID NO: 1610 - protein, 155 aa, Thermococcus kodakaraensis KOD1
  misc_feature (321437)..(321437): n is a or c or g or t.
  misc_feature (527833)..(527833): n is a or c or g or t.
  misc_feature (527901)..(527901): n is a or c or g or t.
  misc_feature (527978)..(527978): n is a or c or g or t.
  misc_feature (960838)..(960839): n is a or c or g or t.
  misc_feature (960860)..(960861): n is a or c or g or t.
  misc_feature (960872)..(960873): n is a or c or g or t.
  misc_feature (960879)..(960879): n is a or c or g or t.
  misc_feature (960890)..(960890): n is a or c or g or t.
  misc_feature (1250239)..(1250239): n is a or c or g or t.
  misc_feature (1302432)..(1302434): n is a or c or g or t.
  misc_feature (1302471)..(1302471): n is a or c or g or t.
  misc_feature (1302488)..(1302488): n is a or c or g or t.
  misc_feature (1674836)..(1674836): n is a or c or g or t.
MAKLALIRLRSGIRARGEVRDTLAMLRLHRINHLVIVDDTPSYRGMIQKVKDYITWGEIDKETLAKLLRKRGRLIGNKPITDEYVKEKLGMTIEEFAEKVVNGEMKLRDLPNIKPVFRLHPPRGGLKGSKKRSFKEGGALGYRGEKINELIERML

SEQ ID NO: 1611 - protein, 485 aa, Thermococcus kodakaraensis KOD1
  misc_feature (321437)..(321437): n is a or c or g or t.
  misc_feature (527833)..(527833): n is a or c or g or t.
  misc_feature (527901)..(527901): n is a or c or g or t.
  misc_feature (527978)..(527978): n is a or c or g or t.
  misc_feature (960838)..(960839): n is a or c or g or t.
  misc_feature (960860)..(960861): n is a or c or g or t.
  misc_feature (960872)..(960873): n is a or c or g or t.
  misc_feature (960879)..(960879): n is a or c or g or t.
  misc_feature (960890)..(960890): n is a or c or g or t.
  misc_feature (1250239)..(1250239): n is a or c or g or t.
  misc_feature (1302432)..(1302434): n is a or c or g or t.
  misc_feature (1302471)..(1302471): n is a or c or g or t.
  misc_feature (1302488)..(1302488): n is a or c or g or t.
  misc_feature (1674836)..(1674836): n is a or c or g or t.
VLKMGVREVVYAIERWFPEVERPKRHVPLKEKFMWTGIALLLYFVLAEIPLYGIPQQVQDYFATLRFVLAGRSGSLLTLGIGPIVTASIIMQLLVGSEIVRLDLSNPEDRRFYQATQRVFAVFMSFFEAFIYVFAGAFGKVNTGIGAFQTVSIPNGPIYIGIGLALLIVLQLGLASTLLILLDELVSKWGIGSGISLFIAAGVSQTVIYRSLAPVQSNQYIDPLTGEPALIGAIPAFIQHILKGDISGAIYRGGTLPDIVKLIGTIVVFLVVVYLESMRVEIPLSYGRVTVRGRYPIRFMYVSNIPIILTMALYANIQLWARLLANYGHPILGQFDSAGNPVGGFVIYLYPPRDIFHVINDPVRALVYALMTIFWSLIFGFLWVELTGLDARSIARQLQNAGLQIPGFRRDPRILERVLQRYIPYVTFWGSFTIALVAVLADFLGALGTGTGILLTVGILYRFYEEIAREQATEMFPALRKFFAK

SEQ ID NO: 1612 - protein, 193 aa, Thermococcus kodakaraensis KOD1
  misc_feature (321437)..(321437): n is a or c or g or t.
  misc_feature (527833)..(527833): n is a or c or g or t.
  misc_feature (527901)..(527901): n is a or c or g or t.
  misc_feature (527978)..(527978): n is a or c or g or t.
  misc_feature (960838)..(960839): n is a or c or g or t.
  misc_feature (960860)..(960861): n is a or c or g or t.
  misc_feature (960872)..(960873): n is a or c or g or t.
  misc_feature (960879)..(960879): n is a or c or g or t.
  misc_feature (960890)..(960890): n is a or c or g or t.
  misc_feature (1250239)..(1250239): n is a or c or g or t.
  misc_feature (1302432)..(1302434): n is a or c or g or t.
  misc_feature (1302471)..(1302471): n is a or c or g or t.
  misc_feature (1302488)..(1302488): n is a or c or g or t.
  misc_feature (1674836)..(1674836): n is a or c or g or t.
MPKGCLVITVSGLAGSGTTTLCRNLAKHYGFKHIYAGLIFRQMAKEMGMTLEEFQKYVELHPEIDREIDRRQIEAAKECNVVIEGRLAGWMVKNADLKIWLDAPIMERAKRVAKREGISVEEAFVKIAEREKQNRKRYLNLYGIDIEDKSIYDLIINTAHWGPDGVFAIVKAAIDHLSPSGDAGEDEKEKEVG

SEQ ID NO: 1613 - protein, 83 aa, Thermococcus kodakaraensis KOD1
  misc_feature (321437)..(321437): n is a or c or g or t.
  misc_feature (527833)..(527833): n is a or c or g or t.
  misc_feature (527901)..(527901): n is a or c or g or t.
  misc_feature (527978)..(527978): n is a or c or g or t.
  misc_feature (960838)..(960839): n is a or c or g or t.
  misc_feature (960860)..(960861): n is a or c or g or t.
  misc_feature (960872)..(960873): n is a or c or g or t.
  misc_feature (960879)..(960879): n is a or c or g or t.
  misc_feature (960890)..(960890): n is a or c or g or t.
  misc_feature (1250239)..(1250239): n is a or c or g or t.
  misc_feature (1302432)..(1302434): n is a or c or g or t.
  misc_feature (1302471)..(1302471): n is a or c or g or t.
  misc_feature (1302488)..(1302488): n is a or c or g or t.
  misc_feature (1674836)..(1674836): n is a or c or g or t.
MPAIEVGRIAVVIAGRRAGQKVVVADIIDKNFVLVTGAGLNKVKRRRMNVKHLEPLPERVNIQRGASDEEIKAALEGAGISLE

SEQ ID NO: 1614 - protein, 195 aa, Thermococcus kodakaraensis KOD1
  misc_feature (321437)..(321437): n is a or c or g or t.
  misc_feature (527833)..(527833): n is a or c or g or t.
  misc_feature (527901)..(527901): n is a or c or g or t.
  misc_feature (527978)..(527978): n is a or c or g or t.
  misc_feature (960838)..(960839): n is a or c or g or t.
  misc_feature (960860)..(960861): n is a or c or g or t.
  misc_feature (960872)..(960873): n is a or c or g or t.
  misc_feature (960879)..(960879): n is a or c or g or t.
  misc_feature (960890)..(960890): n is a or c or g or t.
  misc_feature (1250239)..(1250239): n is a or c or g or t.
  misc_feature (1302432)..(1302434): n is a or c or g or t.
  misc_feature (1302471)..(1302471): n is a or c or g or t.
  misc_feature (1302488)..(1302488): n is a or c or g or t.
  misc_feature (1674836)..(1674836): n is a or c or g or t.
MSHYYSEEPSTPLKTKTIEVCVRGHCFKFITASGVFSFGRLDRGTELLIESMVLQPGWRVLDLGCGYGPIGIVASRFVDYVVMTDVNRRAVSIAKKNLKINGVRNAEVRWGSLYEPVAGEKFDSIITNPPVHAGKEVLREIVINAPRHLNDGGYLQLVIKTKQGAKYIKSLMDETFTEVRELAKGSGYRVYAGIA

SEQ ID NO: 1615 - protein, 185 aa, Thermococcus kodakaraensis KOD1
  misc_feature (321437)..(321437): n is a or c or g or t.
  misc_feature (527833)..(527833): n is a or c or g or t.
  misc_feature (527901)..(527901): n is a or c or g or t.
  misc_feature (527978)..(527978): n is a or c or g or t.
  misc_feature (960838)..(960839): n is a or c or g or t.
  misc_feature (960860)..(960861): n is a or c or g or t.
  misc_feature (960872)..(960873): n is a or c or g or t.
  misc_feature (960879)..(960879): n is a or c or g or t.
  misc_feature (960890)..(960890): n is a or c or g or t.
  misc_feature (1250239)..(1250239): n is a or c or g or t.
  misc_feature (1302432)..(1302434): n is a or c or g or t.
  misc_feature (1302471)..(1302471): n is a or c or g or t.
  misc_feature (1302488)..(1302488): n is a or c or g or t.
  misc_feature (1674836)..(1674836): n is a or c or g or t.
MARALRARGRMATGVQIPVPAPKSLIVSKGCGGVFVMTENFRHIVRVAGVDIDGHKQVRWALTGIKGIGINFATMVLRVAGIDPFMKAGYLTDEQVKKIEEILADPVAHGIPAWAVNRPKDYETGKDMHLITAKLVMAWREDVNRLRRIRAYRGIRHELGLPVRGQRTRSNFRHGTTVGVSRRKK

SEQ ID NO: 1616 - protein, 140 aa, Thermococcus kodakaraensis KOD1
  misc_feature (321437)..(321437): n is a or c or g or t.
  misc_feature (527833)..(527833): n is a or c or g or t.
  misc_feature (527901)..(527901): n is a or c or g or t.
  misc_feature (527978)..(527978): n is a or c or g or t.
  misc_feature (960838)..(960839): n is a or c or g or t.
  misc_feature (960860)..(960861): n is a or c or g or t.
  misc_feature (960872)..(960873): n is a or c or g or t.
  misc_feature (960879)..(960879): n is a or c or g or t.
  misc_feature (960890)..(960890): n is a or c or g or t.
  misc_feature (1250239)..(1250239): n is a or c or g or t.
  misc_feature (1302432)..(1302434): n is a or c or g or t.
  misc_feature (1302471)..(1302471): n is a or c or g or t.
  misc_feature (1302488)..(1302488): n is a or c or g or t.
  misc_feature (1674836)..(1674836): n is a or c or g or t.
MSEEQTTQVNIKKKEKWGVAHIYSSYNNTIIHITDLTGAETISRWSGGMVVKADRDEPSPYAAMIAARRAAEEAMEKGITGVHIKVRAPGGSKSKSPGPGAQAAIRALSRAGLRIGRVEDVTPIPHDGTRPKGGRRGRRV

SEQ ID NO: 1617 - protein, 262 aa, Thermococcus kodakaraensis KOD1
  misc_feature (321437)..(321437): n is a or c or g or t.
  misc_feature (527833)..(527833): n is a or c or g or t.
  misc_feature (527901)..(527901): n is a or c or g or t.
  misc_feature (527978)..(527978): n is a or c or g or t.
  misc_feature (960838)..(960839): n is a or c or g or t.
  misc_feature (960860)..(960861): n is a or c or g or t.
  misc_feature (960872)..(960873): n is a or c or g or t.
  misc_feature (960879)..(960879): n is a or c or g or t.
  misc_feature (960890)..(960890): n is a or c or g or t.
  misc_feature (1250239)..(1250239): n is a or c or g or t.
  misc_feature (1302432)..(1302434): n is a or c or g or t.
  misc_feature (1302471)..(1302471): n is a or c or g or t.
  misc_feature (1302488)..(1302488): n is a or c or g or t.
  misc_feature (1674836)..(1674836): n is a or c or g or t.
VMPMVEFKILEKRPDSIKFIVSGVDVPFANALRRTILSEVPTFAVDEVEFLENDSALFDEIIAHRLAMIPLTTPHERFSLDALELDDYTVTLSLEAEGPGMVYSGDLKSSDGDVKPANPNIPIVKLAEGQRLTFNAYARLGRGKDHAKWQPGFVYYKYLTKIHVSKDVPDWEELKELAERRGLPVEESDEEIVITTIKAFYLPRKFEEHMGKGIREEIVPGSFVFTVETNGELPVEEIVSIALKILMRKSDRFINELHKLAD

SEQ ID NO: 1618 - protein, 123 aa, Thermococcus kodakaraensis KOD1
  misc_feature (321437)..(321437): n is a or c or g or t.
  misc_feature (527833)..(527833): n is a or c or g or t.
  misc_feature (527901)..(527901): n is a or c or g or t.
  misc_feature (527978)..(527978): n is a or c or g or t.
  misc_feature (960838)..(960839): n is a or c or g or t.
  misc_feature (960860)..(960861): n is a or c or g or t.
  misc_feature (960872)..(960873): n is a or c or g or t.
  misc_feature (960879)..(960879): n is a or c or g or t.
  misc_feature (960890)..(960890): n is a or c or g or t.
  misc_feature (1250239)..(1250239): n is a or c or g or t.
  misc_feature (1302432)..(1302434): n is a or c or g or t.
  misc_feature (1302471)..(1302471): n is a or c or g or t.
  misc_feature (1302488)..(1302488): n is a or c or g or t.
  misc_feature (1674836)..(1674836): n is a or c or g or t.
MFMVKRTGPTDINLRRLIRTLRKKSNEEGVKIWKDIAWRLERPRRQRAEVNISKINRYTKEGDVVIVPGSVLGAGRLEHKVVVAAWKFSEAARRKIIEAGGEAISIEELMERNPKGSGVIIME

SEQ ID NO: 1619 - protein, 142 aa, Thermococcus kodakaraensis KOD1 [sequence omitted]

SEQ ID NO: 1620 - protein, 65 aa, Thermococcus kodakaraensis KOD1
  misc_feature (321437)..(321437): n is a or c or g or t.
  misc_feature (527833)..(527833): n is a or c or g or t.
  misc_feature (527901)..(527901): n is a or c or g or t.
  misc_feature (527978)..(527978): n is a or c or g or t.
  misc_feature (960838)..(960839): n is a or c or g or t.
  misc_feature (960860)..(960861): n is a or c or g or t.
  misc_feature (960872)..(960873): n is a or c or g or t.
  misc_feature (960879)..(960879): n is a or c or g or t.
  misc_feature (960890)..(960890): n is a or c or g or t.
  misc_feature (1250239)..(1250239): n is a or c or g or t.
  misc_feature (1302432)..(1302434): n is a or c or g or t.
  misc_feature (1302471)..(1302471): n is a or c or g or t.
  misc_feature (1302488)..(1302488): n is a or c or g or t.
  misc_feature (1674836)..(1674836): n is a or c or g or t.
MIVPVRCFTCGKVLADKYYEFKKRVEAGEDPGKVLDDLGVERYCCRRTLLSHVELIDQVMVYKVY

SEQ ID NO: 1621 - protein, 201 aa, Thermococcus kodakaraensis KOD1
  misc_feature (321437)..(321437): n is a or c or g or t.
  misc_feature (527833)..(527833): n is a or c or g or t.
  misc_feature (527901)..(527901): n is a or c or g or t.
  misc_feature (527978)..(527978): n is a or c or g or t.
  misc_feature (960838)..(960839): n is a or c or g or t.
  misc_feature (960860)..(960861): n is a or c or g or t.
  misc_feature (960872)..(960873): n is a or c or g or t.
  misc_feature (960879)..(960879): n is a or c or g or t.
  misc_feature (960890)..(960890): n is a or c or g or t.
  misc_feature (1250239)..(1250239): n is a or c or g or t.
  misc_feature (1302432)..(1302434): n is a or c or g or t.
  misc_feature (1302471)..(1302471): n is a or c or g or t.
  misc_feature (1302488)..(1302488): n is a or c or g or t.
  misc_feature (1674836)..(1674836): n is a or c or g or t.
VEEYLVPLDQYLAAGVHIGTQQKTKDMKKFIYRVRQDGLYVLDVRKTDERLRVAGKFLAKFDPESILAVSVRLYGQRPVKKFGEVTGAKAIPGRFLPGTMTNPQVKNFIEPDVLIVTDPRADHQALKEAVEIGIPIVALVDTENFLSYVDIAIPTNNKGRKALALIYWILAREVLYNRKEIESREDFKIPVEDFEMRIIRT

SEQ ID NO: 1622 - protein, 270 aa, Thermococcus kodakaraensis KOD1
  misc_feature (321437)..(321437): n is a or c or g or t.
  misc_feature (527833)..(527833): n is a or c or g or t.
  misc_feature (527901)..(527901): n is a or c or g or t.
  misc_feature (527978)..(527978): n is a or c or g or t.
  misc_feature (960838)..(960839): n is a or c or g or t.
  misc_feature (960860)..(960861): n is a or c or g or t.
  misc_feature (960872)..(960873): n is a or c or g or t.
  misc_feature (960879)..(960879): n is a or c or g or t.
  misc_feature (960890)..(960890): n is a or c or g or t.
  misc_feature (1250239)..(1250239): n is a or c or g or t.
  misc_feature (1302432)..(1302434): n is a or c or g or t.
  misc_feature (1302471)..(1302471): n is a or c or g or t.
  misc_feature (1302488)..(1302488): n is a or c or g or t.
  misc_feature (1674836)..(1674836): n is a or c or g or t.
VMRMPRIAIIGGSGVYDPALLTNIREETVETPYGTVKVKIGEYNGEEIVFLARHGEGHSVPPHKINYRANIWALYELGVERILSTSAVGSLNLDMKPGDFVILDQLMDFTKTRHYTFYDGEESPHDRKFVAHVDFTEPYCPELRKALMNAARELGFTYHPMGTYACMEGPRFETRAEIRALKILGADVVGMTQCPEAALARELEMCYASVAIVTNYAAGISPNKLTHTEVVELMAQKSNEIKLLLMKAIEYIPKERRCPCKDALKGATGE

SEQ ID NO: 1623 - protein, 295 aa, Thermococcus kodakaraensis KOD1
  misc_feature (321437)..(321437): n is a or c or g or t.
  misc_feature (527833)..(527833): n is a or c or g or t.
  misc_feature (527901)..(527901): n is a or c or g or t.
  misc_feature (527978)..(527978): n is a or c or g or t.
  misc_feature (960838)..(960839): n is a or c or g or t.
  misc_feature (960860)..(960861): n is a or c or g or t.
  misc_feature (960872)..(960873): n is a or c or g or t.
  misc_feature (960879)..(960879): n is a or c or g or t.
  misc_feature (960890)..(960890): n is a or c or g or t.
  misc_feature (1250239)..(1250239): n is a or c or g or t.
  misc_feature (1302432)..(1302434): n is a or c or g or t.
  misc_feature (1302471)..(1302471): n is a or c or g or t.
  misc_feature (1302488)..(1302488): n is a or c or g or t.
  misc_feature (1674836)..(1674836): n is a or c or g or t.
VMEMVVRYPAVAGSFYPADEELVLMLERFFSDLGEEGNDRRITAGVAPHAGYIFSGYTASRTYKAIFEDGLPETFVILGPNHTGLGSPIAVHPPGTWITPLGEIEVDGELAREIAKISGIADLDDLAHKYEHSIEVQVPFIQYLAEKAGKEVKIVPITLGIQDEDVAEDLGRAIFEASRELGKDVVVIASTDFMHYGQIYGYVPFRARADELPHRIKEWDFRIIRRILDFDVRGMFEEIREMNHTMCGPGGVGTAIVYSRLAGAVEAELLHYTTSFEVSRSTEAVVGYASIVFRR

SEQ ID NO: 1624 - protein, 124 aa, Thermococcus kodakaraensis KOD1
  misc_feature (321437)..(321437): n is a or c or g or t.
  misc_feature (527833)..(527833): n is a or c or g or t.
  misc_feature (527901)..(527901): n is a or c or g or t.
  misc_feature (527978)..(527978): n is a or c or g or t.
  misc_feature (960838)..(960839): n is a or c or g or t.
  misc_feature (960860)..(960861): n is a or c or g or t.
  misc_feature (960872)..(960873): n is a or c or g or t.
  misc_feature (960879)..(960879): n is a or c or g or t.
  misc_feature (960890)..(960890): n is a or c or g or t.
  misc_feature (1250239)..(1250239): n is a or c or g or t.
  misc_feature (1302432)..(1302434): n is a or c or g or t.
  misc_feature (1302471)..(1302471): n is a or c or g or t.
  misc_feature (1302488)..(1302488): n is a or c or g or t.
  misc_feature (1674836)..(1674836): n is a or c or g or t.
MNLDEAVARILQLGGDKVKFIILFGSRARGDARKDSDYDLCVYYEGNEKEAFRFRVLVLGNLPDKYDVQIFQLLPLPLKRECLKGKILFCRDETFLYDLAYEVLKEWEDFKRYYYDYLGLEAIE

SEQ ID NO: 1625 - protein, 262 aa, Thermococcus kodakaraensis KOD1
  misc_feature (321437)..(321437): n is a or c or g or t.
  misc_feature (527833)..(527833): n is a or c or g or t.
  misc_feature (527901)..(527901): n is a or c or g or t.
  misc_feature (527978)..(527978): n is a or c or g or t.
  misc_feature (960838)..(960839): n is a or c or g or t.
  misc_feature (960860)..(960861): n is a or c or g or t.
  misc_feature (960872)..(960873): n is a or c or g or t.
  misc_feature (960879)..(960879): n is a or c or g or t.
  misc_feature (960890)..(960890): n is a or c or g or t.
  misc_feature (1250239)..(1250239): n is a or c or g or t.
  misc_feature (1302432)..(1302434): n is a or c or g or t.
  misc_feature (1302471)..(1302471): n is a or c or g or t.
  misc_feature (1302488)..(1302488): n is a or c or g or t.
  misc_feature (1674836)..(1674836): n is a or c or g or t.
VILIKIGGSVFSDKRGEPENFRTDVVEEIARELAEFYPDEKFVIVHGGGSFGHHYAKEYSIREGLSGSWGIDSWRRLGFSLTHQSMLRANSKFVEIFTDHNLPGFSISTSSLFITERGEILYADIEVIEKLLELDFIPILFGDVSVDVAQGIDILSGDQIMAYLTKMLKPKKAIFLMDVDGIYDGKPGEGTLIPELAREEVPALLERLHCTAAGTDVTGGICNKLRKAYEMAHYSEVWFVNGKVPGRLSGAIRGDGFGTRLR

SEQ ID NO: 1626 - protein, 444 aa, Thermococcus kodakaraensis KOD1
  misc_feature (321437)..(321437): n is a or c or g or t.
  misc_feature (527833)..(527833): n is a or c or g or t.
  misc_feature (527901)..(527901): n is a or c or g or t.
  misc_feature (527978)..(527978): n is a or c or g or t.
  misc_feature (960838)..(960839): n is a or c or g or t.
  misc_feature (960860)..(960861): n is a or c or g or t.
  misc_feature (960872)..(960873): n is a or c or g or t.
  misc_feature (960879)..(960879): n is a or c or g or t.
  misc_feature (960890)..(960890): n is a or c or g or t.
  misc_feature (1250239)..(1250239): n is a or c or g or t.
  misc_feature (1302432)..(1302434): n is a or c or g or t.
  misc_feature (1302471)..(1302471): n is a or c or g or t.
  misc_feature (1302488)..(1302488): n is a or c or g or t.
  misc_feature (1674836)..(1674836): n is a or c or g or t.
MIRVYTISGYEEVGKNMTAVGYSDGRKEEVVIIDMGIRLDRVLIHEDVNIQQFPTKELQRLGAIPDDSILRNKKVVAITFTHGHLDHIGAVGKIAPHYPDVPIYGTPYTIKLAKSEVKSEQYFEVKNPMYETEFGEIVQVSENLAIEFVRITHSIPQAAMVVVHTPEGAVVHTGDFKFDNNNPLGERPDYKRLKELGKEGVKVLIAESTRVAEPTKTPSEAVAQMLLEDFFLYEGMDEKGLIATTFASHIARLQELIWIANKMGRQAVFVGRSLAKYTGIAKQLGLIKMKGARAVRSPNAIKKVLAEVSGARENYLLVVTGHQGEPGAVLTRMANGELYDIGKQDTVVFSAGTIPNPLNRAQRYILETKLKMKGVRMIKDLHVSGHASREDHRYLLRMLNPENIVPAHGEFRMLTHYAELAEEEGYLIGRDVFVSRNGYTVEIE

SEQ ID NO: 1627 - protein, 343 aa, Thermococcus kodakaraensis KOD1
  misc_feature (321437)..(321437): n is a or c or g or t.
  misc_feature (527833)..(527833): n is a or c or g or t.
  misc_feature (527901)..(527901): n is a or c or g or t.
  misc_feature (527978)..(527978): n is a or c or g or t.
  misc_feature (960838)..(960839): n is a or c or g or t.
  misc_feature (960860)..(960861): n is a or c or g or t.
  misc_feature (960872)..(960873): n is a or c or g or t.
  misc_feature (960879)..(960879): n is a or c or g or t.
  misc_feature (960890)..(960890): n is a or c or g or t.
  misc_feature (1250239)..(1250239): n is a or c or g or t.
  misc_feature (1302432)..(1302434): n is a or c or g or t.
  misc_feature (1302471)..(1302471): n is a or c or g or t.
  misc_feature (1302488)..(1302488): n is a or c or g or t.
  misc_feature (1674836)..(1674836): n is a or c or g or t.
MGKYDELFARIKEKAKDVDRVILELVPEKEPLELYKAARHYPLAGGKRVRPFVVLRAAEAVGGDPEKALYPAASVEFIHNYSLVHDDIMDMDELRRGRPTVHKLWGVNMAILAGDLLFSKAFEAIAKAEVPAEKKARILDVLVRTSNLLCEGQALDIEFETKEEVTVEEYLKMISGKTGALFQGSAEIGAIVGTEDEEYIGALSKWGMNVGIAFQIWDDVLDLIADEEKLGKPVGSDIRKGKKTLIVSHFFEHASEEDKAEFLKVFGKYAGDAKGDALIHDENVKEEVAKAIELLKKYGSIDYAANYAKNLIREANEALKVLPESEARRDLELLAEFLVEREF

SEQ ID NO: 1628 - protein, 442 aa, Thermococcus kodakaraensis KOD1
  misc_feature (321437)..(321437): n is a or c or g or t.
  misc_feature (527833)..(527833): n is a or c or g or t.
  misc_feature (527901)..(527901): n is a or c or g or t.
  misc_feature (527978)..(527978): n is a or c or g or t.
  misc_feature (960838)..(960839): n is a or c or g or t.
  misc_feature (960860)..(960861): n is a or c or g or t.
  misc_feature (960872)..(960873): n is a or c or g or t.
  misc_feature (960879)..(960879): n is a or c or g or t.
  misc_feature (960890)..(960890): n is a or c or g or t.
  misc_feature (1250239)..(1250239): n is a or c or g or t.
  misc_feature (1302432)..(1302434): n is a or c or g or t.
  misc_feature (1302471)..(1302471): n is a or c or g or t.
  misc_feature (1302488)..(1302488): n is a or c or g or t.
  misc_feature (1674836)..(1674836): n is a or c or g or t.
VVSMDVLELLSSLVSFETVNDPARGIRPSRDCPAFIRDTLASWGIESELIERDGYYAVYGEIGEGKPKLLFMAHFDVVPVNREEWETDPFKLTVKGDRAYGRGSADDKGNVASIMLALKELSKEKLDGKVLFAFTGDEEIGGRMAMHIAERLAQEGKLPEYMVNADGIGMKPIIRRRKGFGVTVRVPSEKTMVKGTIKREIFRIRTPVLETRHAAYFLPGVDTHPLIAASHFLRSREAFAVSLEGKFLKGNVVPGEVTLTYVVPGEGEEVEVDVGLTRLLKAVVPFVRAPIKAEKYSDYGVSITPNLYSIKDGKHILKFDVRAMSRLKDEIEQAMREVAEFNLPKAEIEVATNEKAGYLFTHPEEKIVRVTLEVLEELGEKAEPVEGPGAADSRFFTPYGVKAIDFGPRGGNIHGPNEYVEIDSLRKMPALYAELARRLVRE

SEQ ID NO: 1629 - protein, 154 aa, Thermococcus kodakaraensis KOD1
  misc_feature (321437)..(321437): n is a or c or g or t.
  misc_feature (527833)..(527833): n is a or c or g or t.
  misc_feature (527901)..(527901): n is a or c or g or t.
  misc_feature (527978)..(527978): n is a or c or g or t.
  misc_feature (960838)..(960839): n is a or c or g or t.
  misc_feature (960860)..(960861): n is a or c or g or t.
  misc_feature (960872)..(960873): n is a or c or g or t.
  misc_feature (960879)..(960879): n is a or c or g or t.
  misc_feature (960890)..(960890): n is a or c or g or t.
  misc_feature (1250239)..(1250239): n is a or c or g or t.
  misc_feature (1302432)..(1302434): n is a or c or g or t.
  misc_feature (1302471)..(1302471): n is a or c or g or t.
  misc_feature (1302488)..(1302488): n is a or c or g or t.
  misc_feature (1674836)..(1674836): n is a or c or g or t.
VGSFRPEGSGSSSEPTVTWGLNIGIDAKGLPSAAAGFSETYTKGLIFKWYTDDIDANRDIEFQFYDLKKKGLLSSSPAWGKIFVAHPVVVPFVKKGTPFHMIELKLRGEAEFVYEEDVIICLGYNCWVSHPRHTVQAPPIEFTVEMYPWFINRR

SEQ ID NO: 1630 - protein, 398 aa, Thermococcus kodakaraensis KOD1
  misc_feature (321437)..(321437): n is a or c or g or t.
  misc_feature (527833)..(527833): n is a or c or g or t.
  misc_feature (527901)..(527901): n is a or c or g or t.
  misc_feature (527978)..(527978): n is a or c or g or t.
  misc_feature (960838)..(960839): n is a or c or g or t.
  misc_feature (960860)..(960861): n is a or c or g or t.
  misc_feature (960872)..(960873): n is a or c or g or t.
  misc_feature (960879)..(960879): n is a or c or g or t.
  misc_feature (960890)..(960890): n is a or c or g or t.
  misc_feature (1250239)..(1250239): n is a or c or g or t.
  misc_feature (1302432)..(1302434): n is a or c or g or t.
  misc_feature (1302471)..(1302471): n is a or c or g or t.
  misc_feature (1302488)..(1302488): n is a or c or g or t.
  misc_feature (1674836)..(1674836): n is a or c or g or t.
VMEMAVVRAWISEEFREFIREVMLASFPALLLCLLLDFFAGAFLGKFFDKIMNEYPIILVILPGLMGLRGNIYGSLASRFTTMLHLGEMTPTIKDRNVTKNVFISIILSLVPVLILWSIGAIKIRSLEIAIAVLLIIIASTVFAGIVLGYITALATIIPFKHEIDPDAVAAPIVTSAADLITVPLLVSFMLLYEKFSVEFYALFAAGLVLLGLLAKFSKIEKSDRRVLAEVLGVVGALALLSSVSGGLLETYSGLIYASVIFSVMYPAVLATTGNLGAIIGTKTSTRIHLGELEGFLNRKILVEILVYSAVGALLGLLANIIAILVVKVTLGARVGLVKPFLVLYPILIFGVMWMAYFMAIIFDRTGLDPDNATVPTITTIADIISTLFIVAVAHMIV

SEQ ID NO: 1631 - protein, 197 aa, Thermococcus kodakaraensis KOD1
  misc_feature (321437)..(321437): n is a or c or g or t.
  misc_feature (527833)..(527833): n is a or c or g or t.
  misc_feature (527901)..(527901): n is a or c or g or t.
  misc_feature (527978)..(527978): n is a or c or g or t.
  misc_feature (960838)..(960839): n is a or c or g or t.
  misc_feature (960860)..(960861): n is a or c or g or t.
  misc_feature (960872)..(960873): n is a or c or g or t.
  misc_feature (960879)..(960879): n is a or c or g or t.
  misc_feature (960890)..(960890): n is a or c or g or t.
  misc_feature (1250239)..(1250239): n is a or c or g or t.
  misc_feature (1302432)..(1302434): n is a or c or g or t.
  misc_feature (1302471)..(1302471): n is a or c or g or t.
  misc_feature (1302488)..(1302488): n is a or c or g or t.
  misc_feature (1674836)..(1674836): n is a or c or g or t.
MKELEEIRNCLIEMKNLSSLMVDLAFSAVMYDSEDIADEVYILEEKMDELTLRVKKLALRAAKHEENPEKLLSVIEMATINEQISDSAYEIADLVLRDVEPHPIIRKIMHDVDEEIGRIKVNKGSILIGKPLKQLKLPTKVGVRLIAIKRGGRYIYNPSKDETIEEGDVLIAVGSGIDRLRELSNERGEEGEQIEEE

SEQ ID NO: 1632 - protein, 299 aa, Thermococcus kodakaraensis KOD1
  misc_feature (321437)..(321437): n is a or c or g or t.
  misc_feature (527833)..(527833): n is a or c or g or t.
  misc_feature (527901)..(527901): n is a or c or g or t.
  misc_feature (527978)..(527978): n is a or c or g or t.
  misc_feature (960838)..(960839): n is a or c or g or t.
  misc_feature (960860)..(960861): n is a or c or g or t.
  misc_feature (960872)..(960873): n is a or c or g or t.
  misc_feature (960879)..(960879): n is a or c or g or t.
  misc_feature (960890)..(960890): n is a or c or g or t.
  misc_feature (1250239)..(1250239): n is a or c or g or t.
  misc_feature (1302432)..(1302434): n is a or c or g or t.
  misc_feature (1302471)..(1302471): n is a or c or g or t.
  misc_feature (1302488)..(1302488): n is a or c or g or t.
  misc_feature (1674836)..(1674836): n is a or c or g or t.
MYFYGGDAVKALTELEHNNMTLRIVLNYELSRITFLGVYENPDGRVYYYIVEGPAKKEAALRDFIKNARHFSQRPTFREASMLGRTRNWTDIGAITWKKASIGTTMEMGVTAEFSYVSTTSGMMYYLVEIYQVAKPKRHDIAVDEMVVDVSVPAEIPLSKIWISKWLPQMDGGPKRYYSYTSQISVDGNTLGYSASASTSEDTNDGITFRWKVKSREIGRDVEFIHYDFVKKIRNGRLSRPAYGMILDANPSVILVSTQNNARLSFEAQAKFNIANRMIVPTDALKFEVEVNPDGVRER

SEQ ID NO: 1633 - protein, 376 aa, Thermococcus kodakaraensis KOD1
  misc_feature (321437)..(321437): n is a or c or g or t.
  misc_feature (527833)..(527833): n is a or c or g or t.
  misc_feature (527901)..(527901): n is a or c or g or t.
  misc_feature (527978)..(527978): n is a or c or g or t.
  misc_feature (960838)..(960839): n is a or c or g or t.
  misc_feature (960860)..(960861): n is a or c or g or t.
  misc_feature (960872)..(960873): n is a or c or g or t.
  misc_feature (960879)..(960879): n is a or c or g or t.
  misc_feature (960890)..(960890): n is a or c or g or t.
  misc_feature (1250239)..(1250239): n is a or c or g or t.
  misc_feature (1302432)..(1302434): n is a or c or g or t.
  misc_feature (1302471)..(1302471): n is a or c or g or t.
  misc_feature (1302488)..(1302488): n is a or c or g or t.
  misc_feature (1674836)..(1674836): n is a or c or g or t.
MWGKWTWVVAVKPLHDPVYLTVAFEQAGETGLSDRGFDLKYSREENPTVRLLEKKVASIEGGTDSLAFNSGMAAISALYISTLKAGEEVVLPMEGYGTTIQLAEELRKFGVRVKLAYPSSEALNEAITENTRLVLTEVVTNPTLKVIDVPEVIRRAKEVGATVVVDNTFSPLIFKPLKVRADGVIHSLTKYIAGHNDVMGGALIWGDLDPENLWHWRRRLGSIIQPFEAWLVIRGLKTLELRFERQSRTAQTIAEFLSEHPKIEKVHYPGLKDDPYHPTARRIFSKPLFGGVLSFLHREGESGAKAFLMRLKRVFPSPSLGGVESLASYPVMSAAKTMPEERRRLLGITPGLIRLSVGVEDADLLIEDIDRALGGG

SEQ ID NO: 1634 - protein, 309 aa, Thermococcus kodakaraensis KOD1
  misc_feature (321437)..(321437): n is a or c or g or t.
  misc_feature (527833)..(527833): n is a or c or g or t.
  misc_feature (527901)..(527901): n is a or c or g or t.
  misc_feature (527978)..(527978): n is a or c or g or t.
  misc_feature (960838)..(960839): n is a or c or g or t.
  misc_feature (960860)..(960861): n is a or c or g or t.
  misc_feature (960872)..(960873): n is a or c or g or t.
  misc_feature (960879)..(960879): n is a or c or g or t.
  misc_feature (960890)..(960890): n is a or c or g or t.
  misc_feature (1250239)..(1250239): n is a or c or g or t.
  misc_feature (1302432)..(1302434): n is a or c or g or t.
  misc_feature (1302471)..(1302471): n is a or c or g or t.
  misc_feature (1302488)..(1302488): n is a or c or g or t.
  misc_feature (1674836)..(1674836): n is a or c or g or t.
MIVPALIGSLPRPVSLAKKIEQYSIGRLGEEDLEKAYLEHTRRAFIKLREAGIQVITDGLYRWDDIFNPFIRFIEGIEVNGLFKFYENNFFYRSPIVRGELSLRENPLPEWLNQALAIKEEVYPGATLKAVLPGPVTLAYHSLNEYYKNLDELSEAYAGVIEEAIKELPVELVEIQEPALAAELSRATREKSDEVSKETAKTLIERLSKVKKLWVVTYFGTPQVLPNNVILNVDLVSGSVPEKYSGELGLGIVDARETRMERRDRLEDKLRPYLRKHSRIYVTPNTLLDFLPESVAWRKLKLLGKLGGE

SEQ ID NO: 1635 - protein, 366 aa, Thermococcus kodakaraensis KOD1
  misc_feature (321437)..(321437): n is a or c or g or t.
  misc_feature (527833)..(527833): n is a or c or g or t.
  misc_feature (527901)..(527901): n is a or c or g or t.
  misc_feature (527978)..(527978): n is a or c or g or t.
  misc_feature (960838)..(960839): n is a or c or g or t.
  misc_feature (960860)..(960861): n is a or c or g or t.
  misc_feature (960872)..(960873): n is a or c or g or t.
  misc_feature (960879)..(960879): n is a or c or g or t.
  misc_feature (960890)..(960890): n is a or c or g or t.
  misc_feature (1250239)..(1250239): n is a or c or g or t.
  misc_feature (1302432)..(1302434): n is a or c or g or t.
  misc_feature (1302471)..(1302471): n is a or c or g or t.
  misc_feature (1302488)..(1302488): n is a or c or g or t.
  misc_feature (1674836)..(1674836): n is a or c or g or t.
VLYSGGRLVVKFGGTSVRDDFREAVTFVSRLWDENEVALVVSAIKGVTDALLKFSRTGEGFEWIEKVHRDFAKKYGIPFETLAAPLRELKKLSREDFPSFEAYRDHVLSYGEWLSGLAFAEALRREGIQVELFEPWEILETDGNFGNARVDIAKTSRNLKVVEEALERGRVAVVPGFVGSYNGLRTTLGREGSDYTAAVLGKGLKARAVLIMSGVDGIYTADPRRVVSARLIPFVSYDELYVASKAGMKAIHHGAIDVVRGIPIIFGRTRDWSIGTIAGYESSSLPILVHRVAGEEAVITAVGVAEVPGFDGENGSELGIPLVRLTVPSARLGSTLNLIHLRLIADRISPPRALSIIRGGVSAGNV

SEQ ID NO: 1636 - protein, 335 aa, Thermococcus kodakaraensis KOD1
  misc_feature (321437)..(321437): n is a or c or g or t.
  misc_feature (527833)..(527833): n is a or c or g or t.
  misc_feature (527901)..(527901): n is a or c or g or t.
  misc_feature (527978)..(527978): n is a or c or g or t.
  misc_feature (960838)..(960839): n is a or c or g or t.
  misc_feature (960860)..(960861): n is a or c or g or t.
  misc_feature (960872)..(960873): n is a or c or g or t.
  misc_feature (960879)..(960879): n is a or c or g or t.
  misc_feature (960890)..(960890): n is a or c or g or t.
  misc_feature (1250239)..(1250239): n is a or c or g or t.
  misc_feature (1302432)..(1302434): n is a or c or g or t.
  misc_feature (1302471)..(1302471): n is a or c or g or t.
  misc_feature (1302488)..(1302488): n is a or c or g or t.
  misc_feature (1674836)..(1674836): n is a or c or g or t.
MRVAVLGATGMVGRTFVRLLAGHPWFRVEKLVASERSAGRKYGELVDDSPEEFRDVEVTSLPEFLRDPDVDIVFNALPASISREVEGELAQSLPVFTNARSHRYDPDVPILVPEVNLEHLELIEVQRERRGWEGFIVTNPNCSTAILTVSLAALRGFGIREVKVATMQAISGAGYSGLSALAIQDNVIPSIPGEEWKIENESRKILGELDGVEVKPAEFRISAMATRVPVLHGHTEAVFVKLEEGSLEEVREAFESFDPLGELGLPSYERPLVYSDVPQPRLHRDRGRGLTVTVGRLEGSSGSFKYVVTGHNLVRGAAGGSVLNAELAYKLGYLK

SEQ ID NO: 1637 - protein, 155 aa, Thermococcus kodakaraensis KOD1
  misc_feature (321437)..(321437): n is a or c or g or t.
  misc_feature (527833)..(527833): n is a or c or g or t.
  misc_feature (527901)..(527901): n is a or c or g or t.
  misc_feature (527978)..(527978): n is a or c or g or t.
  misc_feature (960838)..(960839): n is a or c or g or t.
  misc_feature (960860)..(960861): n is a or c or g or t.
  misc_feature (960872)..(960873): n is a or c or g or t.
  misc_feature (960879)..(960879): n is a or c or g or t.
  misc_feature (960890)..(960890): n is a or c or g or t.
  misc_feature (1250239)..(1250239): n is a or c or g or t.
  misc_feature (1302432)..(1302434): n is a or c or g or t.
  misc_feature (1302471)..(1302471): n is a or c or g or t.
  misc_feature (1302488)..(1302488): n is a or c or g or t.
  misc_feature (1674836)..(1674836): n is a or c or g or t.
MVEIDPFEMAVQQLERAAQFMDISEEALEWLKRPMRIVEVSVPVEMDDGSVKVFTGFRVQHNWARGPTKGGIRWHPAETLSTVKALATWMTWKVAVVDLPYGGGKGGIIVDPKKLSEREQERLARSYIRAVYDVIGPWTDIPALTFTPTRRSWPG

SEQ ID NO: 1638 - protein, 229 aa, Thermococcus kodakaraensis KOD1
  misc_feature (321437)..(321437): n is a or c or g or t.
  misc_feature (527833)..(527833): n is a or c or g or t.
  misc_feature (527901)..(527901): n is a or c or g or t.
  misc_feature (527978)..(527978): n is a or c or g or t.
  misc_feature (960838)..(960839): n is a or c or g or t.
  misc_feature (960860)..(960861): n is a or c or g or t.
  misc_feature (960872)..(960873): n is a or c or g or t.
  misc_feature (960879)..(960879): n is a or c or g or t.
  misc_feature (960890)..(960890): n is a or c or g or t.
  misc_feature (1250239)..(1250239): n is a or c or g or t.
  misc_feature (1302432)..(1302434): n is a or c or g or t.
  misc_feature (1302471)..(1302471): n is a or c or g or t.
  misc_feature (1302488)..(1302488): n is a or c or g or t.
  misc_feature (1674836)..(1674836): n is a or c or g or t.
MNVEEMKKAVAKEALKFIEDEMVVGLGTGSTTAYFINYLGKLLMEGELEDVYGVPTSHQARLLALEAGIPVVSLDEVDAIDIAVDGADEVDPHMNLIKGRGAALTMEKIIEYRAGMFIVLVDESKLVEYLGQKMPVPIEVIPAAWRAIAEELEVFNATAELRMAVKKDGPVVTDNGNFILDAKFARIEDPLDLEIELNTIPGVVENGIFADIADIILVGTPEGVKRMER

SEQ ID NO: 1639 - protein, 152 aa, Thermococcus kodakaraensis KOD1
  misc_feature (321437)..(321437): n is a or c or g or t.
  misc_feature (527833)..(527833): n is a or c or g or t.
  misc_feature (527901)..(527901): n is a or c or g or t.
  misc_feature (527978)..(527978): n is a or c or g or t.
  misc_feature (960838)..(960839): n is a or c or g or t.
  misc_feature (960860)..(960861): n is a or c or g or t.
  misc_feature (960872)..(960873): n is a or c or g or t.
  misc_feature (960879)..(960879): n is a or c or g or t.
  misc_feature (960890)..(960890): n is a or c or g or t.
  misc_feature (1250239)..(1250239): n is a or c or g or t.
  misc_feature (1302432)..(1302434): n is a or c or g or t.
  misc_feature (1302471)..(1302471): n is a or c or g or t.
  misc_feature (1302488)..(1302488): n is a or c or g or t.
  misc_feature (1674836)..(1674836): n is a or c or g or t.
MAEGKIFTVSVTVGQETTTANLIYSKAKTYNLPLYAILSPSKVKGYIFIEAPNKSAVEEAIRGIRHAKRVLPGEIPFSEIEHFLEEKPAVSGFEPGDIVELIAGPFKGEKAKVVRVDESKDEIVVELVSSVVPIPVTVRGEYVRLISKRQKE

SEQ ID NO: 1640 - protein, 28 aa, Thermococcus kodakaraensis KOD1
  misc_feature (321437)..(321437): n is a or c or g or t.
  misc_feature (527833)..(527833): n is a or c or g or t.
  misc_feature (527901)..(527901): n is a or c or g or t.
  misc_feature (527978)..(527978): n is a or c or g or t.
  misc_feature (960838)..(960839): n is a or c or g or t.
  misc_feature (960860)..(960861): n is a or c or g or t.
  misc_feature (960872)..(960873): n is a or c or g or t.
  misc_feature (960879)..(960879): n is a or c or g or t.
  misc_feature (960890)..(960890): n is a or c or g or t.
  misc_feature (1250239)..(1250239): n is a or c or g or t.
  misc_feature (1302432)..(1302434): n is a or c or g or t.
  misc_feature (1302471)..(1302471): n is a or c or g or t.
  misc_feature (1302488)..(1302488): n is a or c or g or t.
  misc_feature (1674836)..(1674836): n is a or c or g or t.
VRPLFPFPFGENFKNTFLKASLILRLAV

SEQ ID NO: 1641 - protein, 216 aa, Thermococcus kodakaraensis KOD1
  misc_feature (321437)..(321437): n is a or c or g or t.
  misc_feature (527833)..(527833): n is a or c or g or t.
  misc_feature (527901)..(527901): n is a or c or g or t.
  misc_feature (527978)..(527978): n is a or c or g or t.
  misc_feature (960838)..(960839): n is a or c or g or t.
  misc_feature (960860)..(960861): n is a or c or g or t.
  misc_feature (960872)..(960873): n is a or c or g or t.
  misc_feature (960879)..(960879): n is a or c or g or t.
  misc_feature (960890)..(960890): n is a or c or g or t.
  misc_feature (1250239)..(1250239): n is a or c or g or t.
  misc_feature (1302432)..(1302434): n is a or c or g or t.
  misc_feature (1302471)..(1302471): n is a or c or g or t.
  misc_feature (1302488)..(1302488): n is a or c or g or t.
  misc_feature (1674836)..(1674836): n is a or c or g or t.
VAFDRQKLVEAVKEAKARAKPRNFTQTVEMAVNLKDVDLRKPENRFKLEVVLPHGRGKEPKIAVIADGAVAEAAKKLGLDVISGEELEELAKSPRQARKLAKKYDFFIAAAPLMPKIGRYLGRYLGPRNKMPVVVPPTMTNLEPIVEKLKKTVRIQLKNNPVVHAPIGTEDMDDEKLAENAEAVLNAIINKLERGENQVKSVYIKTTMGPAVKVER

SEQ ID NO: 1642 - protein, 109 aa, Thermococcus kodakaraensis KOD1
  misc_feature (321437)..(321437): n is a or c or g or t.
  misc_feature (527833)..(527833): n is a or c or g or t.
  misc_feature (527901)..(527901): n is a or c or g or t.
  misc_feature (527978)..(527978): n is a or c or g or t.
  misc_feature (960838)..(960839): n is a or c or g or t.
  misc_feature (960860)..(960861): n is a or c or g or t.
  misc_feature (960872)..(960873): n is a or c or g or t.
  misc_feature (960879)..(960879): n is a or c or g or t.
  misc_feature (960890)..(960890): n is a or c or g or t.
  misc_feature (1250239)..(1250239): n is a or c or g or t.
  misc_feature (1302432)..(1302434): n is a or c or g or t.
  misc_feature (1302471)..(1302471): n is a or c or g or t.
  misc_feature (1302488)..(1302488): n is a or c or g or t.
  misc_feature (1674836)..(1674836): n is a or c or g or t.
VRKMEYVYAALLLHAAGKEITEENLKAVLEAAGVTPDEARIKALVAALEGVNIDEVIEKAAMPVAAPVAVAAAPAAEGGAAEAAQEEEEEEEEEASEEEALAGLGALFG

SEQ ID NO: 1643 - protein, 424 aa, Thermococcus kodakaraensis KOD1
  misc_feature (321437)..(321437): n is a or c or g or t.
  misc_feature (527833)..(527833): n is a or c or g or t.
  misc_feature (527901)..(527901): n is a or c or g or t.
  misc_feature (527978)..(527978): n is a or c or g or t.
  misc_feature (960838)..(960839): n is a or c or g or t.
  misc_feature (960860)..(960861): n is a or c or g or t.
  misc_feature (960872)..(960873): n is a or c or g or t.
  misc_feature (960879)..(960879): n is a or c or g or t.
  misc_feature (960890)..(960890): n is a or c or g or t.
  misc_feature (1250239)..(1250239): n is a or c or g or t.
  misc_feature (1302432)..(1302434): n is a or c or g or t.
  misc_feature (1302471)..(1302471): n is a or c or g or t.
  misc_feature (1302488)..(1302488): n is a or c or g or t.
  misc_feature (1674836)..(1674836): n is a or c or g or t.
MPEIAVRMTKRNHNAFVHLLGALESQGFDLGELLITKDFNEILRAKPKVVLYSFFTEEIWGSLRDEIRLLKERGALLVAGGYHAIAMPKHTLNVLGFDIAVIGEGEEVLYQLLTTLKKTGYRITKELANITGLAFYLNGDFVFTGFAKVENFWRFPPYPESVRLISPIEITRGCPFGCYYCQTPYIKGFRMRHRPIDQIVKYSKRMKDMRYITPNAFAYGSPGAILKLDKLEALLKALQPLRKEGRRLFYGTFPSEVRPEFVLPETLELLIDYADNRRLAIGAQSGDDAMLKAMHRLHRVEHVQRAVEYMLEYGFEPVVDFIVGLPNETRESQRKSIELMKWIMAKGGKVRAHYFMPLPGTPWSRCRPSPLSDEMKKFLGRMAAKGKIEGSWGKQIELSRRLQRLIEEFYEEPMAYHGRVREVC

SEQ ID NO: 1644 - protein, 573 aa, Thermococcus kodakaraensis KOD1
  misc_feature (321437)..(321437): n is a or c or g or t.
  misc_feature (527833)..(527833): n is a or c or g or t.
  misc_feature (527901)..(527901): n is a or c or g or t.
  misc_feature (527978)..(527978): n is a or c or g or t.
  misc_feature (960838)..(960839): n is a or c or g or t.
  misc_feature (960860)..(960861): n is a or c or g or t.
  misc_feature (960872)..(960873): n is a or c or g or t.
  misc_feature (960879)..(960879): n is a or c or g or t.
  misc_feature (960890)..(960890): n is a or c or g or t.
  misc_feature (1250239)..(1250239): n is a or c or g or t.
  misc_feature (1302432)..(1302434): n is a or c or g or t.
  misc_feature (1302471)..(1302471): n is a or c or g or t.
  misc_feature (1302488)..(1302488): n is a or c or g or t.
  misc_feature (1674836)..(1674836): n is a or c or g or t.
MEEIRELVLKYALINAYTHRGKANPKAVIGKVLGENPELRKRAKEIIPLVNEVVNEVNSLSLEEQEAKLREIYPEFFEEKNEKKEEKKGLPPLPKAERGKVVTRFAPNPDGAFHLGNARAAILSHEYARMYDGKFILRFDDTDPKVKRPEPIFYEWIKEDLEWLGFRIDEIHIASDRLEIYYDYAEKLIKMGKAYVCTCPPEKFRELRDKGIACPHREEPVEVQLERWRKMLNGEYREGEAVVRIKTDLNHPNPAVRDWPALRIIDNPNHPRTGNKYRVWPLYNFASAIDDHELGVTHIFRGQEHAENETRQRYVYEYFGWEYPVTVHHGRLSIEGVILSKSKTRKGIEEGKYLGWDDPRLGTIRALRRRGIKPEAIRELIIEVGLKRSDTTISWDNLAAINRKIIEPIANRYFFVADPIPMYVEGAQEFTAEIPLHPDYPERGVRRLKFEPDKPVYVSKDDMELFKPGNFVRLKDLFNVEIMEVNENGIRARFHSFEYEVARENRWRMVHWVTEGKACEVWVPEGDELIIREGLLESDADVKVDDIVQFERFGFVRIDDVRPEKVVAIFAHK

SEQ ID NO: 1645 - protein, 236 aa, Thermococcus kodakaraensis KOD1
  misc_feature (321437)..(321437): n is a or c or g or t.
  misc_feature (527833)..(527833): n is a or c or g or t.
  misc_feature (527901)..(527901): n is a or c or g or t.
  misc_feature (527978)..(527978): n is a or c or g or t.
  misc_feature (960838)..(960839): n is a or c or g or t.
  misc_feature (960860)..(960861): n is a or c or g or t.
  misc_feature (960872)..(960873): n is a or c or g or t.
  misc_feature (960879)..(960879): n is a or c or g or t.
  misc_feature (960890)..(960890): n is a or c or g or t.
  misc_feature (1250239)..(1250239): n is a or c or g or t.
  misc_feature (1302432)..(1302434): n is a or c or g or t.
  misc_feature (1302471)..(1302471): n is a or c or g or t.
  misc_feature (1302488)..(1302488): n is a or c or g or t.
  misc_feature (1674836)..(1674836): n is a or c or g or t.
VELYYSEKFNPEELALLGRAIGTVAQGTVIVGRDGRAISRYGKRAMVVGIVSTGSTIMDVRLIPLIALKDFAHSKGMPLAYVYYHGGVRVEVNGLDVDEVEAILKSRSFIEAHPNDIGATVYYPNALDDFLHDLFKRYNFKIGGKALVDAMNTPAVLFFPRLSEHFGFEAELINDMMTSYIPPKPKEVFLHKLNKGDYTFGLRFRPDGIAEFYKDGEEKTFTSMWSLFDYLKRVFK

SEQ ID NO: 1646 - protein, 497 aa, Thermococcus kodakaraensis KOD1
  misc_feature (321437)..(321437): n is a or c or g or t.
  misc_feature (527833)..(527833): n is a or c or g or t.
  misc_feature (527901)..(527901): n is a or c or g or t.
  misc_feature (527978)..(527978): n is a or c or g or t.
  misc_feature (960838)..(960839): n is a or c or g or t.
  misc_feature (960860)..(960861): n is a or c or g or t.
  misc_feature (960872)..(960873): n is a or c or g or t.
  misc_feature (960879)..(960879): n is a or c or g or t.
  misc_feature (960890)..(960890): n is a or c or g or t.
  misc_feature (1250239)..(1250239): n is a or c or g or t.
  misc_feature (1302432)..(1302434): n is a or c or g or t.
  misc_feature (1302471)..(1302471): n is a or c or g or t.
  misc_feature (1302488)..(1302488): n is a or c or g or t.
  misc_feature (1674836)..(1674836): n is a or c or g or t.
MEKFVLSLDEGTTSARAIIFDRESNIHGIGQYEFPQHYPRPGWVEHNPEEIWDAQLRAIKDAIQSARIEPNQIAAIGVTNQRETTLVWDKDGKPLYNAIVWQCRRTAEMVEEIKREYGTMIKEKTGLVPDAYFSASKLKWLLDNVPGLREKAEKGEVMFGTVDTFLIYRLTGEHVTDYSNASRTMLFNIKKLDWDDELLELFDIPESVLPEVRESSEVYGYTKKELLGAEIPVSGDAGDQQAALFGQAAFEAGMVKATYGTGSFILVNTDKMVLYSDNLLTTIAWGLNGRVSYALEGSIFVTGAAVQWLRDGIKIIKHASETEELATKLESNEGVYFVPAFVGLGAPYWDQFARGIIIGITRGTGREHLARATLEAIAYLTRDVVDEMEKLVQIKELRVDGGATANDFLMQFQADILNRKVIRPVVKETTALGAAYLAGLAVDYWADTREIAELWKAERIFEPKMDEKTRERLYKGWKEAVKRAMGWAKVVDSAKSN

SEQ ID NO: 1647 - protein, 422 aa, Thermococcus kodakaraensis KOD1
  misc_feature (321437)..(321437): n is a or c or g or t.
  misc_feature (527833)..(527833): n is a or c or g or t.
  misc_feature (527901)..(527901): n is a or c or g or t.
  misc_feature (527978)..(527978): n is a or c or g or t.
  misc_feature (960838)..(960839): n is a or c or g or t.
  misc_feature (960860)..(960861): n is a or c or g or t.
  misc_feature (960872)..(960873): n is a or c or g or t.
  misc_feature (960879)..(960879): n is a or c or g or t.
  misc_feature (960890)..(960890): n is a or c or g or t.
  misc_feature (1250239)..(1250239): n is a or c or g or t.
  misc_feature (1302432)..(1302434): n is a or c or g or t.
  misc_feature (1302471)..(1302471): n is a or c or g or t.
  misc_feature (1302488)..(1302488): n is a or c or g or t.
  misc_feature (1674836)..(1674836): n is a or c or g or t.
MMEPMPQIPMLSYDVVVIGGGPAGMAAAAKAKELGLNVLLLDENDYLGGILPQCIHPGFGLHYFKEELTGPEFASRLAKRLVELGVEYRTAARVLEIKNYSDLEKVVIFTSPAGVYQVWAKAIIYAAGARERHAFEIGIVGDRVAGIYTAGEAQTLMDIYGVLPGKEVVIVGSGDVGLIMARRFALEGAKVKAVVELMPYPGGLARNVMILRDFNIPLYLSHKVVEVRGKGRVQRVRVVKVDENFNEIPGSEFWIEVDTLVISAGLIPSVKKLKKIGVEIDPATGGPVVNDRLETSVPGIFVAGNSLLINDLVDYVAEQGELAAKSAKEFIENGGIESRKWVKVEKGQNVRLIAPHYLGGDRDVYLYLRVARPMENVELRIPEIGKKLRLPVVKPAEMIRLKLRAEEIQKASERLTVEVVRA

SEQ ID NO: 1648 - protein, 454 aa, Thermococcus kodakaraensis KOD1
  misc_feature (321437)..(321437): n is a or c or g or t.
  misc_feature (527833)..(527833): n is a or c or g or t.
  misc_feature (527901)..(527901): n is a or c or g or t.
  misc_feature (527978)..(527978): n is a or c or g or t.
  misc_feature (960838)..(960839): n is a or c or g or t.
  misc_feature (960860)..(960861): n is a or c or g or t.
  misc_feature (960872)..(960873): n is a or c or g or t.
  misc_feature (960879)..(960879): n is a or c or g or t.
  misc_feature (960890)..(960890): n is a or c or g or t.
  misc_feature (1250239)..(1250239): n is a or c or g or t.
  misc_feature (1302432)..(1302434): n is a or c or g or t.
  misc_feature (1302471)..(1302471): n is a or c or g or t.
  misc_feature (1302488)..(1302488): n is a or c or g or t.
  misc_feature (1674836)..(1674836): n is a or c or g or t.
VISMGKHYIPNSAHKDEMLKEIGFSSIEDLFSDVPKGMVKEFNLPEGKSEYEVFTELNETLSKNKTVLEMPSFLGAGTYFHYVPAHVKYLIERSEFLTAYTPYQPEISQGMLQALFEYQSLIAELVGLPIVNSSMYDWGTAMAEAALMSARVTKRNKFVVPKHLSPEKKLVLKTYTAGPGLETVEVPWDERGQMDIEKLKEAVEGAAGVYIEMPNFFGLLEENIREIGEIAHDAGALFVVGVDPTILGIVEAPGELGADIVVGEAAYFGNPMNFGGPRAGIFAVRNDRKLIRQMPGRIIGMTKDADGKRAFVMTLQTREQHIRRAKATSNICSNEALVAVAAAIHLATLGPKGVRELGEVILKNTAYLKKRLAEVGEIVFDGVNFKDVPVRFEVPYSVIHERLLERNIHGGYYIGKHFQELGETALFAATETTRKEWVDGLVDALREIIGEAEL

SEQ ID NO: 1649 - protein, 166 aa, Thermococcus kodakaraensis KOD1
  misc_feature (321437)..(321437): n is a or c or g or t.
  misc_feature (527833)..(527833): n is a or c or g or t.
  misc_feature (527901)..(527901): n is a or c or g or t.
  misc_feature (527978)..(527978): n is a or c or g or t.
  misc_feature (960838)..(960839): n is a or c or g or t.
  misc_feature (960860)..(960861): n is a or c or g or t.
  misc_feature (960872)..(960873): n is a or c or g or t.
  misc_feature (960879)..(960879): n is a or c or g or t.
  misc_feature (960890)..(960890): n is a or c or g or t.
  misc_feature (1250239)..(1250239): n is a or c or g or t.
  misc_feature (1302432)..(1302434): n is a or c or g or t.
  misc_feature (1302471)..(1302471): n is a or c or g or t.
  misc_feature (1302488)..(1302488): n is a or c or g or t.
  misc_feature (1674836)..(1674836): n is a or c or g or t.
MACENTRERKPRDNNPSQDAGGSRENGSLHRQTELSFFELLSQKPREGEGMSWLAVLGRFAEEFEIRLVDLSEVQQIVIMNSLYGGGEHIEVDLLLRGGEKVHVRDLPTSADIEKIVRDLNLEVRRSKAGKSDLSILAVEETGVRRFSFSELEQLRNFPEETGVRA

SEQ ID NO: 1650 - protein, 172 aa, Thermococcus kodakaraensis KOD1
  misc_feature (321437)..(321437): n is a or c or g or t.
  misc_feature (527833)..(527833): n is a or c or g or t.
  misc_feature (527901)..(527901): n is a or c or g or t.
  misc_feature (527978)..(527978): n is a or c or g or t.
  misc_feature (960838)..(960839): n is a or c or g or t.
  misc_feature (960860)..(960861): n is a or c or g or t.
  misc_feature (960872)..(960873): n is a or c or g or t.
  misc_feature (960879)..(960879): n is a or c or g or t.
  misc_feature (960890)..(960890): n is a or c or g or t.
  misc_feature (1250239)..(1250239): n is a or c or g or t.
  misc_feature (1302432)..(1302434): n is a or c or g or t.
  misc_feature (1302471)..(1302471): n is a or c or g or t.
  misc_feature (1302488)..(1302488): n is a or c or g or t.
  misc_feature (1674836)..(1674836): n is a or c or g or t.
MTNDGDRRNLITTSREIRKVRRQTISAIFNQLQGFSAHEEFSDLVQEAKEKYGITRIGVFDVDMIIWDFKNAMPIALLEVKNRHQLQESDGYAIFDEPQYTFLEDLGNYLGVPVFYVVKTRVKWLVWKVERGLAVRRKLADGRKIVLLPLDKAERYNHGEMVHRFLKRLMER

SEQ ID NO: 1651 - protein, 210 aa, Thermococcus kodakaraensis KOD1
  misc_feature (321437)..(321437): n is a or c or g or t.
  misc_feature (527833)..(527833): n is a or c or g or t.
  misc_feature (527901)..(527901): n is a or c or g or t.
  misc_feature (527978)..(527978): n is a or c or g or t.
  misc_feature (960838)..(960839): n is a or c or g or t.
  misc_feature (960860)..(960861): n is a or c or g or t.
  misc_feature (960872)..(960873): n is a or c or g or t.
  misc_feature (960879)..(960879): n is a or c or g or t.
  misc_feature (960890)..(960890): n is a or c or g or t.
  misc_feature (1250239)..(1250239): n is a or c or g or t.
  misc_feature (1302432)..(1302434): n is a or c or g or t.
  misc_feature (1302471)..(1302471): n is a or c or g or t.
  misc_feature (1302488)..(1302488): n is a or c or g or t.
  misc_feature (1674836)..(1674836): n is a or c or g or t.
VRVMSEEAVAQEVVLDEKDITSLVEDVDKDLEEVEELLNEGEAEVEEVAGTSGLMTEEEFNARIDEFQEKDHSLTIFANFYVKNLERKAREQGLDVDFSLWWDVGRPSFNAGLWYMEKVEGQSLQVSGKFGLLVGAGSLLLLTWMYRSALKKKGKEKADKGPAAGGEKRTGEPEKPVKTEAEALREKAKPKEPEPPKSELLNKIQKNLGS

SEQ ID NO: 1652 - protein, 306 aa, Thermococcus kodakaraensis KOD1
  misc_feature (321437)..(321437): n is a or c or g or t.
  misc_feature (527833)..(527833): n is a or c or g or t.
  misc_feature (527901)..(527901): n is a or c or g or t.
  misc_feature (527978)..(527978): n is a or c or g or t.
  misc_feature (960838)..(960839): n is a or c or g or t.
  misc_feature (960860)..(960861): n is a or c or g or t.
  misc_feature (960872)..(960873): n is a or c or g or t.
  misc_feature (960879)..(960879): n is a or c or g or t.
  misc_feature (960890)..(960890): n is a or c or g or t.
  misc_feature (1250239)..(1250239): n is a or c or g or t.
  misc_feature (1302432)..(1302434): n is a or c or g or t.
  misc_feature (1302471)..(1302471): n is a or c or g or t.
  misc_feature (1302488)..(1302488): n is a or c or g or t.
  misc_feature (1674836)..(1674836): n is a or c or g or t.
VVIMYQLNTGMVKYHNEKVDSYEVPVRFSIANPKPKTIYAQVEIIDAGNLNFTFADGTTVKQYSINANTTFVVSENLLPGTNPSGTMKDSVTLKVSYYSNSNYTGLFGTDTIQITVNYYIQNSDLTWVSSDYPDDSAFIVDYWDNTCFSTSTGQPATGKLGNLTLTMNSTKKESDTQGIVSSLAPQLLLSVGWYHTSKGSKTWNVSVPLSGAEANNVFLAGIINWTSRDWSGGNTPTTRIYAEFTGAGAFYSTTTVPSVFKLVWFPSEFEKRLRFYIYIYSSYSYEVTDVYIRYILDGLIAFNPLP

SEQ ID NO: 1653 - protein, 34 aa, Thermococcus kodakaraensis KOD1
  misc_feature (321437)..(321437): n is a or c or g or t.
  misc_feature (527833)..(527833): n is a or c or g or t.
  misc_feature (527901)..(527901): n is a or c or g or t.
  misc_feature (527978)..(527978): n is a or c or g or t.
  misc_feature (960838)..(960839): n is a or c or g or t.
  misc_feature (960860)..(960861): n is a or c or g or t.
  misc_feature (960872)..(960873): n is a or c or g or t.
  misc_feature (960879)..(960879): n is a or c or g or t.
  misc_feature (960890)..(960890): n is a or c or g or t.
  misc_feature (1250239)..(1250239): n is a or c or g or t.
  misc_feature (1302432)..(1302434): n is a or c or g or t.
  misc_feature (1302471)..(1302471): n is a or c or g or t.
  misc_feature (1302488)..(1302488): n is a or c or g or t.
  misc_feature (1674836)..(1674836): n is a or c or g or t.
MLNSELLVLCWGTLENPTGTLYEKLKLTPVEIIS

SEQ ID NO: 1654 - protein, 83 aa, Thermococcus kodakaraensis KOD1
  misc_feature (321437)..(321437): n is a or c or g or t.
  misc_feature (527833)..(527833): n is a or c or g or t.
  misc_feature (527901)..(527901): n is a or c or g or t.
  misc_feature (527978)..(527978): n is a or c or g or t.
  misc_feature (960838)..(960839): n is a or c or g or t.
  misc_feature (960860)..(960861): n is a or c or g or t.
  misc_feature (960872)..(960873): n is a or c or g or t.
  misc_feature (960879)..(960879): n is a or c or g or t.
  misc_feature (960890)..(960890): n is a or c or g or t.
  misc_feature (1250239)..(1250239): n is a or c or g or t.
  misc_feature (1302432)..(1302434): n is a or c or g or t.
  misc_feature (1302471)..(1302471): n is a or c or g or t.
  misc_feature (1302488)..(1302488): n is a or c or g or t.
  misc_feature (1674836)..(1674836): n is a or c or g or t.
VVPMVRAYVLLTVEIGKVESVIEALRKMPGVTKADAVTGPYDAIVHIEAKDLGELTRKILHDIHNIDGVIDTTTAIVVETEEE

SEQ ID NO: 1655 - protein, 638 aa, Thermococcus kodakaraensis KOD1
  misc_feature (321437)..(321437): n is a or c or g or t.
  misc_feature (527833)..(527833): n is a or c or g or t.
  misc_feature (527901)..(527901): n is a or c or g or t.
  misc_feature (527978)..(527978): n is a or c or g or t.
  misc_feature (960838)..(960839): n is a or c or g or t.
  misc_feature (960860)..(960861): n is a or c or g or t.
  misc_feature (960872)..(960873): n is a or c or g or t.
  misc_feature (960879)..(960879): n is a or c or g or t.
  misc_feature (960890)..(960890): n is a or c or g or t.
  misc_feature (1250239)..(1250239): n is a or c or g or t.
  misc_feature (1302432)..(1302434): n is a or c or g or t.
  misc_feature (1302471)..(1302471): n is a or c or g or t.
  misc_feature (1302488)..(1302488): n is a or c or g or t.
  misc_feature (1674836)..(1674836): n is a or c or g or t.
MCEQVGKMGRPVFLGKAYINWCEKCNVPLIGDSCAVHGKEGVFRLNITPPGDLRFAFEKDIEFIRSVFMEHYGVDIGEILEGKIVLLNKLPSEDDAYEIILDGYVFGYVKYNPLELKWHAGLKVEGAIALWKRFGKKMKKWIVVDKGAVGPIKKGANLMAVGVLEADPSIRVGDEVILVTEDGEVFATGIAKKDYDALMRGERGTGVKPKRQKAVNYREGKKATMEDVLRANSIALEEKVVKSREFMRRVANKYSDLPKAVAFSGGKDSLAVLGLALEEFGTDFTVFFNNTGIEFPETVQYVEELRKELEPKGVRFIVADAGDAFWRALYVFSPPGRDYRWCCKVTKLGPITMAIKENYPKGVLMFVGQRKYESIKRFKQPRVWRNEWVPNEIGASPIFHWRAIEVWLYIFSRKLKYNPLYARGFDRIGCFLCPSASLAEFERLKREKPELWEKWKKALEYWRERFDLPEEWVTYGFWRWKKLSKGEKSIARKLGVDIPEERSWEPVKVQIEETDDGYELTFNTVLNKKRLLEVAPILGEVEVDGDVIKAGQVEFLTGTRTARAPNEEEAWSAYYLVKRAYECFGCGFCVGKCPENALSIDERSKKIVVDWDSCVHCRECMDVCPLLKIKNPEEGSQL

SEQ ID NO: 1656 - protein, 206 aa, Thermococcus kodakaraensis KOD1
  misc_feature (321437)..(321437): n is a or c or g or t.
  misc_feature (527833)..(527833): n is a or c or g or t.
  misc_feature (527901)..(527901): n is a or c or g or t.
  misc_feature (527978)..(527978): n is a or c or g or t.
  misc_feature (960838)..(960839): n is a or c or g or t.
  misc_feature (960860)..(960861): n is a or c or g or t.
  misc_feature (960872)..(960873): n is a or c or g or t.
  misc_feature (960879)..(960879): n is a or c or g or t.
  misc_feature (960890)..(960890): n is a or c or g or t.
  misc_feature (1250239)..(1250239): n is a or c or g or t.
  misc_feature (1302432)..(1302434): n is a or c or g or t.
  misc_feature (1302471)..(1302471): n is a or c or g or t.
  misc_feature (1302488)..(1302488): n is a or c or g or t.
  misc_feature (1674836)..(1674836): n is a or c or g or t.
VREMEELFVCPECGSENVEVIRERGRELTLRCNDCGHVWHVTLPKFRKVPLIVSKHERSFKSEAELPEGEEIKVGDIVETEDDEVRITGIELEGDKRVNKAKVEEVKTLWGESLTYPKVIKVSIYLPKGITQAFKVKVPRSEEFVVGEVIEVGGYTFRVEKIKTERKMLHHGKARADEIVAIMGHQIPKARARRSLEIYRGYDEES

SEQ ID NO: 1657 - protein, 125 aa, Thermococcus kodakaraensis KOD1
  misc_feature (321437)..(321437): n is a or c or g or t.
  misc_feature (527833)..(527833): n is a or c or g or t.
  misc_feature (527901)..(527901): n is a or c or g or t.
  misc_feature (527978)..(527978): n is a or c or g or t.
  misc_feature (960838)..(960839): n is a or c or g or t.
  misc_feature (960860)..(960861): n is a or c or g or t.
  misc_feature (960872)..(960873): n is a or c or g or t.
  misc_feature (960879)..(960879): n is a or c or g or t.
  misc_feature (960890)..(960890): n is a or c or g or t.
  misc_feature (1250239)..(1250239): n is a or c or g or t.
  misc_feature (1302432)..(1302434): n is a or c or g or t.
  misc_feature (1302471)..(1302471): n is a or c or g or t.
  misc_feature (1302488)..(1302488): n is a or c or g or t.
  misc_feature (1674836)..(1674836): n is a or c or g or t.
MKMAKPSYVKFEVPQELAEKALEAVEIARDTGRIRKGTNETTKAVERGQAKLVIIAEDVDPEEIVAHLPPLCEEKEIPYVYVPSKKELGAAAGLEVPAASVAIIEPGKARELVEDIAMKVKELMK

SEQ ID NO: 1658 - protein, 69 aa, Thermococcus kodakaraensis KOD1
  misc_feature (321437)..(321437): n is a or c or g or t.
  misc_feature (527833)..(527833): n is a or c or g or t.
  misc_feature (527901)..(527901): n is a or c or g or t.
  misc_feature (527978)..(527978): n is a or c or g or t.
  misc_feature (960838)..(960839): n is a or c or g or t.
  misc_feature (960860)..(960861): n is a or c or g or t.
  misc_feature (960872)..(960873): n is a or c or g or t.
  misc_feature (960879)..(960879): n is a or c or g or t.
  misc_feature (960890)..(960890): n is a or c or g or t.
  misc_feature (1250239)..(1250239): n is a or c or g or t.
  misc_feature (1302432)..(1302434): n is a or c or g or t.
  misc_feature (1302471)..(1302471): n is a or c or g or t.
  misc_feature (1302488)..(1302488): n is a or c or g or t.
  misc_feature (1674836)..(1674836): n is a or c or g or t.
MKMARWNVCSYCGREFEPGTGKMFVRNDGRVLFFCSSKCEKYYFMGRNPRKLKWTKAFQEARLQRAKRK

SEQ ID NO: 1659 - protein, 1147 aa, Thermococcus kodakaraensis KOD1
  misc_feature (321437)..(321437): n is a or c or g or t.
  misc_feature (527833)..(527833): n is a or c or g or t.
  misc_feature (527901)..(527901): n is a or c or g or t.
  misc_feature (527978)..(527978): n is a or c or g or t.
  misc_feature (960838)..(960839): n is a or c or g or t.
  misc_feature (960860)..(960861): n is a or c or g or t.
  misc_feature (960872)..(960873): n is a or c or g or t.
  misc_feature (960879)..(960879): n is a or c or g or t.
  misc_feature (960890)..(960890): n is a or c or g or t.
  misc_feature (1250239)..(1250239): n is a or c or g or t.
  misc_feature (1302432)..(1302434): n is a or c or g or t.
  misc_feature (1302471)..(1302471): n is a or c or g or t.
  misc_feature (1302488)..(1302488): n is a or c or g or t.
  misc_feature (1674836)..(1674836): n is a or c or g or t.
VRKMTKRIRQPIIAVLGHVDHGKCLLPDEKVILPEHGPITLKGLFDLAKETVVADNEKEIRKLGAKLTIVGEDGRLRVLESPYVWKVRHRGKMLRVKLKNWHSVSVTPEHPFLTTRGWVRADQLKPGDYVAVPRVIHGNESDERFVSFVYEKLKNDELIAKLRGEVLSKISSEFKGDRAYKVERNVFRWEDIERLNLWDEVERVAFTPRMHRSGKPLHYVKLPRSPEEWEAFFYFAGVMFGDGSQDKIANNDVEVYEELKKLSVLGVAVKRVERTTSYEIELTNGKNALLRLLRVLFEYPERQKAKSIRVPRILFIAPRKYVSRFLRGYFDADGHVSLKDARIEVTSASQEFLEDLSLLLLRFGIVSKIYRSDYTTLVISGRRNLDLFRRYIGFSVKNKAEALEKAIKKSRRSESYPIFEELKRLRLLFGFTRTELNSNVPFYGKYESEEAPSYETLMRILDAIEKGSINLDKKIAVLEGRIRDHNYIKAFEKDGLIKDGKLTELGRELLEVWRNREFDSSDVDYIRNLAENLVFIPVEDIEEFEYEGYVYDVTTETHNFVANGILVHNTTLLDRIRHTNVAGKEAGGITQHIGATEVPIDVVKQLAGPLIKLWKGEIKLPGLLFIDTPGHEAFTSLRARGGSLADLAVLVVDINEGFQPQTIESIEILRRYRTPFIVAANKIDRIKGWVIEEDEPFLVNIKKQDQRAIQELETKLWELIGKFYEMGFNANRFDRVQDFTRELAIVPISAKYGIGIPELLVLIAGLSQKYLEEKLKIEVEGPARGTILEVREEVGLGTTIDVIIYDGTLRKDDTIVVGGKDKAIVTKIRALLKPKPLDEIRDPRFRFDQVDEVTAAAGVKIAAPGLEEALAGSPVIAARSEEEIEKAKQEILSQIQSVVINTGKIGVIVKADTLGSLEALSKELQEKGIPIRKADVGNISKTDVMEALSVKEEEPKYGVVLGFNVKVNEDAEEVANAKGVPIFVGNIIYKLIEDYEAWVKEEEEKRKRELLKNVTFPGVIRLYPDERYVFRRSKPAIVGVEVLEGRIRPGVTLIKETGEKVGVIKSIKNKNDFVQEAKKGDAVAIAIEGAIVGRHIHPGETLYVDLSKNDVIILAKQLKDELEETDIKALKMTAKVKAKEDPFWRAV

SEQ ID NO: 1660 - protein, 470 aa, Thermococcus kodakaraensis KOD1
  misc_feature (321437)..(321437): n is a or c or g or t.
  misc_feature (527833)..(527833): n is a or c or g or t.
  misc_feature (527901)..(527901): n is a or c or g or t.
  misc_feature (527978)..(527978): n is a or c or g or t.
  misc_feature (960838)..(960839): n is a or c or g or t.
  misc_feature (960860)..(960861): n is a or c or g or t.
  misc_feature (960872)..(960873): n is a or c or g or t.
  misc_feature (960879)..(960879): n is a or c or g or t.
  misc_feature (960890)..(960890): n is a or c or g or t.
  misc_feature (1250239)..(1250239): n is a or c or g or t.
  misc_feature (1302432)..(1302434): n is a or c or g or t.
  misc_feature (1302471)..(1302471): n is a or c or g or t.
  misc_feature (1302488)..(1302488): n is a or c or g or t.
  misc_feature (1674836)..(1674836): n is a or c or g or t.
MRSEKVERMREQILNGPIVKTLLILAYPLIINQLVQVLYNLTDTFWLGKLGRLELSAPGTAWPLVWFFMSIGMGFATAGFAFVSQYVGAKDYDRANRYAGALYSLMLLFATAVGVSGVILAPYLLRLMGVSDTIFPYALRYTRVIFAGIPFSFTLFAFNFLLRAVGDTRTPVKINIGTVLLNLVLDPFFIFGWGPFPQLGVVGAAVATMLSNSLGSLIGGYLLFTGKVGIHLTPETLKPDFHFYSRIFRVGLPSSIGSSTTALGFVILTRVIFTVGRLYGEAHGLPHYEDVAFATYSITNRLTNFMFAFSDGISMAMGTMVGQSIGAGLYERAKKIAEKTMLINFAILSAGTILFAAFRVPIFRFFINDPAIIAESRKVVLYFSASLPFFGIFSAVNNTFNSAGHTKKSMVIGMIRLWGIRLPLSYGLGVLMRDTAGMWLGMGLSNVLGAVIALAWFLRGSWMRAIIEKH

SEQ ID NO: 1661 - protein, 262 aa, Thermococcus kodakaraensis KOD1
  misc_feature (321437)..(321437): n is a or c or g or t.
  misc_feature (527833)..(527833): n is a or c or g or t.
  misc_feature (527901)..(527901): n is a or c or g or t.
  misc_feature (527978)..(527978): n is a or c or g or t.
  misc_feature (960838)..(960839): n is a or c or g or t.
  misc_feature (960860)..(960861): n is a or c or g or t.
  misc_feature (960872)..(960873): n is a or c or g or t.
  misc_feature (960879)..(960879): n is a or c or g or t.
  misc_feature (960890)..(960890): n is a or c or g or t.
  misc_feature (1250239)..(1250239): n is a or c or g or t.
  misc_feature (1302432)..(1302434): n is a or c or g or t.
  misc_feature (1302471)..(1302471): n is a or c or g or t.
  misc_feature (1302488)..(1302488): n is a or c or g or t.
  misc_feature (1674836)..(1674836): n is a or c or g or t.
MRIEEHVAFTAKHNDWRVAKKLTELEDENVAHFLAGIANSVNSRIPGYMGEKIDIDGIRKLAEEVRKDTLSDTIVALKSPGTSRKLGGLVRENDKKLKKLLVDAAKAVLVRMTLEGVVPINYPEGELTGVEVEFPYEEDHVNFTAKHGKWIVVKRLIIDEKTPLLDVARLLASINETVTLKLPAYAHIDVEGIEGEFSAFKKVKKSDIPKVVEAYEAFEPSAYADEPFLEHARVYALRVALEKIGLPLDVPSKSLEKYLEKA

SEQ ID NO: 1662 - protein, 135 aa, Thermococcus kodakaraensis KOD1
  misc_feature (321437)..(321437): n is a or c or g or t.
  misc_feature (527833)..(527833): n is a or c or g or t.
  misc_feature (527901)..(527901): n is a or c or g or t.
  misc_feature (527978)..(527978): n is a or c or g or t.
  misc_feature (960838)..(960839): n is a or c or g or t.
  misc_feature (960860)..(960861): n is a or c or g or t.
  misc_feature (960872)..(960873): n is a or c or g or t.
  misc_feature (960879)..(960879): n is a or c or g or t.
  misc_feature (960890)..(960890): n is a or c or g or t.
  misc_feature (1250239)..(1250239): n is a or c or g or t.
  misc_feature (1302432)..(1302434): n is a or c or g or t.
  misc_feature (1302471)..(1302471): n is a or c or g or t.
  misc_feature (1302488)..(1302488): n is a or c or g or t.
  misc_feature (1674836)..(1674836): n is a or c or g or t.
MFRLNRRKGQGAIEYLFMIAAALVIILIAVRYVSNSGSQAQEQGNIAQLQAQAELAKSNLISRNAWNDNYIVTWGDNGNKTLVIKPDSSTPLVNATATHADTYKSVISNDLTLKKVYDNCMAGDEKYCYILIDLG

SEQ ID NO: 1663 - protein, 231 aa, Thermococcus kodakaraensis KOD1
  misc_feature (321437)..(321437): n is a or c or g or t.
  misc_feature (527833)..(527833): n is a or c or g or t.
  misc_feature (527901)..(527901): n is a or c or g or t.
  misc_feature (527978)..(527978): n is a or c or g or t.
  misc_feature (960838)..(960839): n is a or c or g or t.
  misc_feature (960860)..(960861): n is a or c or g or t.
  misc_feature (960872)..(960873): n is a or c or g or t.
  misc_feature (960879)..(960879): n is a or c or g or t.
  misc_feature (960890)..(960890): n is a or c or g or t.
  misc_feature (1250239)..(1250239): n is a or c or g or t.
  misc_feature (1302432)..(1302434): n is a or c or g or t.
  misc_feature (1302471)..(1302471): n is a or c or g or t.
  misc_feature (1302488)..(1302488): n is a or c or g or t.
  misc_feature (1674836)..(1674836): n is a or c or g or t.
VCAQAAREYYTFWQRFFRDVPLLMFTDITSLSDVFGKIRAQIDENSDEILQKLLQITPEEATKESYERAIGDINNIILSETSPFLDELMEAAENSYINPEEVKEEVLNILIPEIVELQAQVNESNRKLWEKALSKDNLTEEEVKQFEILDKFLSLEANLLGIMVENRDFNTIEELIGYFLLLLLRVLKIVEEERDLAELEKDFKIVAEKIKSLNPEPRTIDDYFIDELLED

SEQ ID NO: 1664 - protein, 81 aa, Thermococcus kodakaraensis KOD1
  misc_feature (321437)..(321437): n is a or c or g or t.
  misc_feature (527833)..(527833): n is a or c or g or t.
  misc_feature (527901)..(527901): n is a or c or g or t.
  misc_feature (527978)..(527978): n is a or c or g or t.
  misc_feature (960838)..(960839): n is a or c or g or t.
  misc_feature (960860)..(960861): n is a or c or g or t.
  misc_feature (960872)..(960873): n is a or c or g or t.
  misc_feature (960879)..(960879): n is a or c or g or t.
  misc_feature (960890)..(960890): n is a or c or g or t.
  misc_feature (1250239)..(1250239): n is a or c or g or t.
  misc_feature (1302432)..(1302434): n is a or c or g or t.
  misc_feature (1302471)..(1302471): n is a or c or g or t.
  misc_feature (1302488)..(1302488): n is a or c or g or t.
  misc_feature (1674836)..(1674836): n is a or c or g or t.
VGKMLELLVLLFLLIAVGWILIKLTLAIIKWLALNTIAGLLIIGLLNFLGVTHVQLNLLNLLIVAIGGIPGVFIVILLSLL

SEQ ID NO: 1665 - protein, 372 aa, Thermococcus kodakaraensis KOD1
  misc_feature (321437)..(321437): n is a or c or g or t.
  misc_feature (527833)..(527833): n is a or c or g or t.
  misc_feature (527901)..(527901): n is a or c or g or t.
  misc_feature (527978)..(527978): n is a or c or g or t.
  misc_feature (960838)..(960839): n is a or c or g or t.
  misc_feature (960860)..(960861): n is a or c or g or t.
  misc_feature (960872)..(960873): n is a or c or g or t.
  misc_feature (960879)..(960879): n is a or c or g or t.
  misc_feature (960890)..(960890): n is a or c or g or t.
  misc_feature (1250239)..(1250239): n is a or c or g or t.
  misc_feature (1302432)..(1302434): n is a or c or g or t.
  misc_feature (1302471)..(1302471): n is a or c or g or t.
  misc_feature (1302488)..(1302488): n is a or c or g or t.
  misc_feature (1674836)..(1674836): n is a or c or g or t.
VFGTRPEIIKLAPVVRAFLEMGIKPLLIHTGQHYDYEMSRIFLEELELPPIDYHLEVGSGTQAEQTGKAMIKIEKVLMEERPDVTLVQGDTNTVLAGALASVKLKIPVAHVEAGLRSFDRTMPEEINRILADHASEVLFPPTEEARKNLEREGITENVYVVGNTIVDAVLQNSLVAEKKSDVLERLDLKPKEYILITAHRAENTDSWENLTRLVEILESLPMMAVYPIHPRTEGRLKRFGLWERVASIENLILTKPLGYLDFLRLEKNAFAVMTDSGGVQEEAIILDVPCLTLRYNTERPETVKAGGNILVGLERERVLRYLQRLIEDRDFYEKMAKAPNPFGDGKAGEKIAKILVGLYEKGELKVKSSRFI

SEQ ID NO: 1666 - protein, 177 aa, Thermococcus kodakaraensis KOD1
  misc_feature (321437)..(321437): n is a or c or g or t.
  misc_feature (527833)..(527833): n is a or c or g or t.
  misc_feature (527901)..(527901): n is a or c or g or t.
  misc_feature (527978)..(527978): n is a or c or g or t.
  misc_feature (960838)..(960839): n is a or c or g or t.
  misc_feature (960860)..(960861): n is a or c or g or t.
  misc_feature (960872)..(960873): n is a or c or g or t.
  misc_feature (960879)..(960879): n is a or c or g or t.
  misc_feature (960890)..(960890): n is a or c or g or t.
  misc_feature (1250239)..(1250239): n is a or c or g or t.
  misc_feature (1302432)..(1302434): n is a or c or g or t.
  misc_feature (1302471)..(1302471): n is a or c or g or t.
  misc_feature (1302488)..(1302488): n is a or c or g or t.
  misc_feature (1674836)..(1674836): n is a or c or g or t.
MEEASKISRYLYTLIILFLIWLALTASLDQQELIFGFVLSAIVAAITYPIFTTRGLANLHPKRVAYAIAYAPYFLWAMIMANLDVAYRVLHPKRPIRPGIVHCKTILKTNPGKLSLANSITLTPGTITLDVDGDDYFIHWIWVPDEVLHAESEEVHVEKASENITRPFEKFLKVIFG

SEQ ID NO: 1667 - protein, 94 aa, Thermococcus kodakaraensis KOD1
  misc_feature (321437)..(321437): n is a or c or g or t.
  misc_feature (527833)..(527833): n is a or c or g or t.
  misc_feature (527901)..(527901): n is a or c or g or t.
  misc_feature (527978)..(527978): n is a or c or g or t.
  misc_feature (960838)..(960839): n is a or c or g or t.
  misc_feature (960860)..(960861): n is a or c or g or t.
  misc_feature (960872)..(960873): n is a or c or g or t.
  misc_feature (960879)..(960879): n is a or c or g or t.
  misc_feature (960890)..(960890): n is a or c or g or t.
  misc_feature (1250239)..(1250239): n is a or c or g or t.
  misc_feature (1302432)..(1302434): n is a or c or g or t.
  misc_feature (1302471)..(1302471): n is a or c or g or t.
  misc_feature (1302488)..(1302488): n is a or c or g or t.
  misc_feature (1674836)..(1674836): n is a or c or g or t.
MNCITCIEYIVVALMIISAILAVEWRDLLAAAVGMAAVSLFASILFFMLQAPDVAMTEAAIGAALSGAIVIFAVKRTQRFETEEEEKPGWWVRW

SEQ ID NO: 1668 - protein, 495 aa, Thermococcus kodakaraensis KOD1
  misc_feature (321437)..(321437): n is a or c or g or t.
  misc_feature (527833)..(527833): n is a or c or g or t.
  misc_feature (527901)..(527901): n is a or c or g or t.
  misc_feature (527978)..(527978): n is a or c or g or t.
  misc_feature (960838)..(960839): n is a or c or g or t.
  misc_feature (960860)..(960861): n is a or c or g or t.
  misc_feature (960872)..(960873): n is a or c or g or t.
  misc_feature (960879)..(960879): n is a or c or g or t.
  misc_feature (960890)..(960890): n is a or c or g or t.
  misc_feature (1250239)..(1250239): n is a or c or g or t.
  misc_feature (1302432)..(1302434): n is a or c or g or t.
  misc_feature (1302471)..(1302471): n is a or c or g or t.
  misc_feature (1302488)..(1302488): n is a or c or g or t.
  misc_feature (1674836)..(1674836): n is a or c or g or t.
MNGQYASLLIALPLISAFFVPLIKGLGRKAVMGYLVLITALQTAIAGWVANEVYSTGKPIIVMAGGWKPPVGINLYIGHFAALFVFIIAVISFFMAFFSFRAVTVEPVDKYAMLFLLLMLGATGMIATGDLFNLFVFMEITSITAYALTAYNKTGEAAEASMKYIVLGGIGSSFFLIGVALIYGATGTLNMAHLAQLAGAIDPTVAQVGLALIIFGLAVEAELFPLNAWAPDAYQAAPHPITVMFSAFVVKAGLYAIARLLYILQNANGWSGVLKLVIIMATLTVVVAEFSALRQKDVKRMIAYSSISQVGMIAFALALGTQAGVDAGVFHMVNHAIVKALLFLTVGYVGVALGGTTIENFQGLGKRMPLTALTLTIGSLAAVGIPLFNIFWSKVRILLAGVEAGYSWSVALILGASVVEAVYYLRLIHTIWFVEGGERVRENFAIGVIAIFLAALIIVIGVYPNDVWTIVQKAGQDIFNVANYIKNVPLMGVGA

SEQ ID NO: 1669 - protein, 199 aa, Thermococcus kodakaraensis KOD1
  misc_feature (321437)..(321437): n is a or c or g or t.
  misc_feature (527833)..(527833): n is a or c or g or t.
  misc_feature (527901)..(527901): n is a or c or g or t.
  misc_feature (527978)..(527978): n is a or c or g or t.
  misc_feature (960838)..(960839): n is a or c or g or t.
  misc_feature (960860)..(960861): n is a or c or g or t.
  misc_feature (960872)..(960873): n is a or c or g or t.
  misc_feature (960879)..(960879): n is a or c or g or t.
  misc_feature (960890)..(960890): n is a or c or g or t.
  misc_feature (1250239)..(1250239): n is a or c or g or t.
  misc_feature (1302432)..(1302434): n is a or c or g or t.
  misc_feature (1302471)..(1302471): n is a or c or g or t.
  misc_feature (1302488)..(1302488): n is a or c or g or t.
  misc_feature (1674836)..(1674836): n is a or c or g or t.
VMVMSEMQNGDVIHYELKEFQLFEPLFRWARKKSLWIVAFCTGCGGIEMPPLATARYDFERFGIMPNPAPRMADLFLITGYVTPKTLKRIIITYEMMQDPKYVLAHGSCPINGGVYWDSYNVVKQLDKYIPIDVAIAGCMPRPEAVMDGIMEIMRKIENGEADGWKRYKENYEWYKKNQDELFGEGWREKDARRWLAWI

SEQ ID NO: 1670 - protein, 397 aa, Thermococcus kodakaraensis KOD1
  misc_feature (321437)..(321437): n is a or c or g or t.
  misc_feature (527833)..(527833): n is a or c or g or t.
  misc_feature (527901)..(527901): n is a or c or g or t.
  misc_feature (527978)..(527978): n is a or c or g or t.
  misc_feature (960838)..(960839): n is a or c or g or t.
  misc_feature (960860)..(960861): n is a or c or g or t.
  misc_feature (960872)..(960873): n is a or c or g or t.
  misc_feature (960879)..(960879): n is a or c or g or t.
  misc_feature (960890)..(960890): n is a or c or g or t.
  misc_feature (1250239)..(1250239): n is a or c or g or t.
  misc_feature (1302432)..(1302434): n is a or c or g or t.
  misc_feature (1302471)..(1302471): n is a or c or g or t.
  misc_feature (1302488)..(1302488): n is a or c or g or t.
  misc_feature (1674836)..(1674836): n is a or c or g or t.
VMIMANLEVPRELREEAKAHDMYLHPIDKDTYELFFGPQHMATENFSIILKMDGNRVEKAIVNPGFLHRGFEKLAEQRPYFTNIALLLRICVPESDVPENIYSMAVDEIVGWEVPERAIWIRTVVLEMARLSAWMFWIMGFGNEIGLYTAGQWAAAYRERFMRLYEELTGGRVYHIYTVPGGVRRDIPGDKWLRQLRDTVEYLKGKLKDFDEILFDNYIMFERTEGVGVMDKKFALKHAVTGPNLRAVGVPYDVRKDDPYYLYDQLDFEVPVLKEGDSLARVLVRRYEMEQDLYILEQLLDMGPPSGPYMVQDARLKALPRFKPPAGEAYAHVESTKGDFGAFVVSDGTHKPYRVHVRGPSQSHGVTVLEELLKGARLADVPVILKTLDNCPPDIDR

SEQ ID NO: 1671 - protein, 153 aa, Thermococcus kodakaraensis KOD1
  misc_feature (321437)..(321437): n is a or c or g or t.
  misc_feature (527833)..(527833): n is a or c or g or t.
  misc_feature (527901)..(527901): n is a or c or g or t.
  misc_feature (527978)..(527978): n is a or c or g or t.
  misc_feature (960838)..(960839): n is a or c or g or t.
  misc_feature (960860)..(960861): n is a or c or g or t.
  misc_feature (960872)..(960873): n is a or c or g or t.
  misc_feature (960879)..(960879): n is a or c or g or t.
  misc_feature (960890)..(960890): n is a or c or g or t.
  misc_feature (1250239)..(1250239): n is a or c or g or t.
  misc_feature (1302432)..(1302434): n is a or c or g or t.
  misc_feature (1302471)..(1302471): n is a or c or g or t.
  misc_feature (1302488)..(1302488): n is a or c or g or t.
  misc_feature (1674836)..(1674836): n is a or c or g or t.
MANTEELDALDRSILRILQEDGRASYSEIARRIGVPESTVRLRVKRLVEKGVIRKFAALINPFKAGYSIVAFIAVDAEPGKVKEAVERLSKLPEVDVLGIATGAHDILMQVTVRDLKELEDFLIEKLGSIDGIKSTETSILTSVRKWGYARVF

SEQ ID NO: 1672 - protein, 154 aa, Thermococcus kodakaraensis KOD1
  misc_feature (321437)..(321437): n is a or c or g or t.
  misc_feature (527833)..(527833): n is a or c or g or t.
  misc_feature (527901)..(527901): n is a or c or g or t.
  misc_feature (527978)..(527978): n is a or c or g or t.
  misc_feature (960838)..(960839): n is a or c or g or t.
  misc_feature (960860)..(960861): n is a or c or g or t.
  misc_feature (960872)..(960873): n is a or c or g or t.
  misc_feature (960879)..(960879): n is a or c or g or t.
  misc_feature (960890)..(960890): n is a or c or g or t.
  misc_feature (1250239)..(1250239): n is a or c or g or t.
  misc_feature (1302432)..(1302434): n is a or c or g or t.
  misc_feature (1302471)..(1302471): n is a or c or g or t.
  misc_feature (1302488)..(1302488): n is a or c or g or t.
  misc_feature (1674836)..(1674836): n is a or c or g or t.
MQEWYRSRALYDGVMKLVKSHRFDEALELVEKIPDNKVKSMALNQIVVELVKAGEDYSKALTRAIEAAMNVTGQNESTKTLMGLAFDLLELGMVDDALKIAEYISDLSNRAKVEAEVALKLAEKGEVAQAMEIIENILDEDVKTWATSRLANKL

SEQ ID NO: 1673 - protein, 157 aa, Thermococcus kodakaraensis KOD1
  misc_feature (321437)..(321437): n is a or c or g or t.
  misc_feature (527833)..(527833): n is a or c or g or t.
  misc_feature (527901)..(527901): n is a or c or g or t.
  misc_feature (527978)..(527978): n is a or c or g or t.
  misc_feature (960838)..(960839): n is a or c or g or t.
  misc_feature (960860)..(960861): n is a or c or g or t.
  misc_feature (960872)..(960873): n is a or c or g or t.
  misc_feature (960879)..(960879): n is a or c or g or t.
  misc_feature (960890)..(960890): n is a or c or g or t.
  misc_feature (1250239)..(1250239): n is a or c or g or t.
  misc_feature (1302432)..(1302434): n is a or c or g or t.
  misc_feature (1302471)..(1302471): n is a or c or g or t.
  misc_feature (1302488)..(1302488): n is a or c or g or t.
  misc_feature (1674836)..(1674836): n is a or c or g or t.
MSVHIALLGRTPWALVNTYYASVMRGERPKEVYIVTERRYSHSLPKITEAIKTISEAYGFSPEVKTLVIPDDDFKEADKVLKNLFSKLKEKDGDIVLNMTSGRKALVAAAIIHSRESNVREILYMALLDVQFPNRPYMMLPTHMQVLKNFLGDGNGG

SEQ ID NO: 1674 - protein, 133 aa, Thermococcus kodakaraensis KOD1
  misc_feature (321437)..(321437): n is a or c or g or t.
  misc_feature (527833)..(527833): n is a or c or g or t.
  misc_feature (527901)..(527901): n is a or c or g or t.
  misc_feature (527978)..(527978): n is a or c or g or t.
  misc_feature (960838)..(960839): n is a or c or g or t.
  misc_feature (960860)..(960861): n is a or c or g or t.
  misc_feature (960872)..(960873): n is a or c or g or t.
  misc_feature (960879)..(960879): n is a or c or g or t.
  misc_feature (960890)..(960890): n is a or c or g or t.
  misc_feature (1250239)..(1250239): n is a or c or g or t.
  misc_feature (1302432)..(1302434): n is a or c or g or t.
  misc_feature (1302471)..(1302471): n is a or c or g or t.
  misc_feature (1302488)..(1302488): n is a or c or g or t.
  misc_feature (1674836)..(1674836): n is a or c or g or t.
VSVMAIWQGRSLKKPSGGRIILARKKRKRELGREPANTKVGEDREKRKIIRTYGGNRKVRLVEALYANVFEGGKGKKVKILNVVENPANRQYARRNIITKGAIIETEIGKAIVTSRPGQDGVVNAVLIKEENA

SEQ ID NO: 1675 - protein, 378 aa, Thermococcus kodakaraensis KOD1
  misc_feature (321437)..(321437): n is a or c or g or t.
  misc_feature (527833)..(527833): n is a or c or g or t.
  misc_feature (527901)..(527901): n is a or c or g or t.
  misc_feature (527978)..(527978): n is a or c or g or t.
  misc_feature (960838)..(960839): n is a or c or g or t.
  misc_feature (960860)..(960861): n is a or c or g or t.
  misc_feature (960872)..(960873): n is a or c or g or t.
  misc_feature (960879)..(960879): n is a or c or g or t.
  misc_feature (960890)..(960890): n is a or c or g or t.
  misc_feature (1250239)..(1250239): n is a or c or g or t.
  misc_feature (1302432)..(1302434): n is a or c or g or t.
  misc_feature (1302471)..(1302471): n is a or c or g or t.
  misc_feature (1302488)..(1302488): n is a or c or g or t.
  misc_feature (1674836)..(1674836): n is a or c or g or t.
MNALYDLIIPILNFISRWALFIASTYQAKKTREKGWVLLSAAFLIDALDMESYVLDPLGITFKENAYLVASVVSTFAVAILFLWGALHIKYGKTDFKDVAYVAIFVVVSYIWIFLVASDIKLFENLTVAYSLPYLIFGLSMIYFGYVLLEATMPKSIERLFPYGLILLGALNLTYPVTRFIDWFAPIGFLLGALFRFMAAVGAVKYVFYPMRAVSVSGASEPIKGSFMFKGKEEVVQAIGDVWSRPGTVIITRENIMDVMSKIHPGSLVFWVTRAKEGVISETPQVYAVSPTSIDILTDLVANALRKGYRTVYIDSVEYLIIENGFERTMKFLLNLKDMTLNANGLMILVINEETLDEKQKGMIEREFETFRQGQASR

SEQ ID NO: 1676 - protein, 176 aa, Thermococcus kodakaraensis KOD1
  misc_feature (321437)..(321437): n is a or c or g or t.
  misc_feature (527833)..(527833): n is a or c or g or t.
  misc_feature (527901)..(527901): n is a or c or g or t.
  misc_feature (527978)..(527978): n is a or c or g or t.
  misc_feature (960838)..(960839): n is a or c or g or t.
  misc_feature (960860)..(960861): n is a or c or g or t.
  misc_feature (960872)..(960873): n is a or c or g or t.
  misc_feature (960879)..(960879): n is a or c or g or t.
  misc_feature (960890)..(960890): n is a or c or g or t.
  misc_feature (1250239)..(1250239): n is a or c or g or t.
  misc_feature (1302432)..(1302434): n is a or c or g or t.
  misc_feature (1302471)..(1302471): n is a or c or g or t.
  misc_feature (1302488)..(1302488): n is a or c or g or t.
  misc_feature (1674836)..(1674836): n is a or c or g or t.
VILMPVYEIEGKKPKIHPTAFVDETASIIGDVVLEEKTSVWPSAVLRGDIEQIYIGCCSNVQDNVSIHTSHGLPTKIGKYVTIGHNAVVHGATVDDYTIIGMGAIILDGAKIGKHVIIGAGALVPPGKEIPDYSLVVGVPGKVVRQLSEEEIEWTKKNAEIYMELAEKHLKRKKIE

SEQ ID NO: 1677 - protein, 264 aa, Thermococcus kodakaraensis KOD1
  misc_feature (321437)..(321437): n is a or c or g or t.
  misc_feature (527833)..(527833): n is a or c or g or t.
  misc_feature (527901)..(527901): n is a or c or g or t.
  misc_feature (527978)..(527978): n is a or c or g or t.
  misc_feature (960838)..(960839): n is a or c or g or t.
  misc_feature (960860)..(960861): n is a or c or g or t.
  misc_feature (960872)..(960873): n is a or c or g or t.
  misc_feature (960879)..(960879): n is a or c or g or t.
  misc_feature (960890)..(960890): n is a or c or g or t.
  misc_feature (1250239)..(1250239): n is a or c or g or t.
  misc_feature (1302432)..(1302434): n is a or c or g or t.
  misc_feature (1302471)..(1302471): n is a or c or g or t.
  misc_feature (1302488)..(1302488): n is a or c or g or t.
  misc_feature (1674836)..(1674836): n is a or c or g or t.
MLYRLVSHIPHILFKPVYDAYESYLLEKVKSGNIPKHVAIIMDGNRRWARKLEKPPWYGHLFGSKKLEEILEWCRELNIRTLTVYAFSTENFKRSKEEVEALMNLFEEKFKELVQDERVHRYGIRVNVLGRKDMLPENVRKAAEEAERATRKYSNYNLNIALAYGGRSEIADAVREIVRDVLEGKIKPEDIDEEAIKRYLYYPNMPDPDIVIRTGGEVRISNFLLYQIAYSELFFVDVYFPEFRKIDFLRIIREFQKRQRRFGR

SEQ ID NO: 1678 - protein, 209 aa, Thermococcus kodakaraensis KOD1
  misc_feature (321437)..(321437): n is a or c or g or t.
  misc_feature (527833)..(527833): n is a or c or g or t.
  misc_feature (527901)..(527901): n is a or c or g or t.
  misc_feature (527978)..(527978): n is a or c or g or t.
  misc_feature (960838)..(960839): n is a or c or g or t.
  misc_feature (960860)..(960861): n is a or c or g or t.
  misc_feature (960872)..(960873): n is a or c or g or t.
  misc_feature (960879)..(960879): n is a or c or g or t.
  misc_feature (960890)..(960890): n is a or c or g or t.
  misc_feature (1250239)..(1250239): n is a or c or g or t.
  misc_feature (1302432)..(1302434): n is a or c or g or t.
  misc_feature (1302471)..(1302471): n is a or c or g or t.
  misc_feature (1302488)..(1302488): n is a or c or g or t.
  misc_feature (1674836)..(1674836): n is a or c or g or t.
MRAKRVITIHVRDDREKEEFMRELQRLRLPAFIYVHGKLDSLKINVQGTKDEIREAIQKIREIHTRVRAKLYPDRMGLYRYKVDDLLREAGTSVSTPIIVKTLELLGERVELKDDEIVTSMPWEEAVEVTSRLGEALAEIALQTTRQIREVVLPVAIAYDLDPEEVLERLVELGLAEWKEDKFKYELVKNKEQALEELLKALEGDENED

SEQ ID NO: 1679 - protein, 134 aa, Thermococcus kodakaraensis KOD1
  misc_feature (321437)..(321437): n is a or c or g or t.
  misc_feature (527833)..(527833): n is a or c or g or t.
  misc_feature (527901)..(527901): n is a or c or g or t.
  misc_feature (527978)..(527978): n is a or c or g or t.
  misc_feature (960838)..(960839): n is a or c or g or t.
  misc_feature (960860)..(960861): n is a or c or g or t.
  misc_feature (960872)..(960873): n is a or c or g or t.
  misc_feature (960879)..(960879): n is a or c or g or t.
  misc_feature (960890)..(960890): n is a or c or g or t.
  misc_feature (1250239)..(1250239): n is a or c or g or t.
  misc_feature (1302432)..(1302434): n is a or c or g or t.
  misc_feature (1302471)..(1302471): n is a or c or g or t.
  misc_feature (1302488)..(1302488): n is a or c or g or t.
  misc_feature (1674836)..(1674836): n is a or c or g or t.
VMELISYTRDFTDKGLAKLGDSLINLVFSLALSEYLGKPTGERVPNASLAIALEMAGLRHIIPPRTDKHGKGDIAEALFAYAWLEKKITIEEAVEILSQNLDDDVTHFTRKKETIGKAFAVLYEEIGKRLGLKD

SEQ ID NO: 1680 - protein, 330 aa, Thermococcus kodakaraensis KOD1
  misc_feature (321437)..(321437): n is a or c or g or t.
  misc_feature (527833)..(527833): n is a or c or g or t.
  misc_feature (527901)..(527901): n is a or c or g or t.
  misc_feature (527978)..(527978): n is a or c or g or t.
  misc_feature (960838)..(960839): n is a or c or g or t.
  misc_feature (960860)..(960861): n is a or c or g or t.
  misc_feature (960872)..(960873): n is a or c or g or t.
  misc_feature (960879)..(960879): n is a or c or g or t.
  misc_feature (960890)..(960890): n is a or c or g or t.
  misc_feature (1250239)..(1250239): n is a or c or g or t.
  misc_feature (1302432)..(1302434): n is a or c or g or t.
  misc_feature (1302471)..(1302471): n is a or c or g or t.
  misc_feature (1302488)..(1302488): n is a or c or g or t.
  misc_feature (1674836)..(1674836): n is a or c or g or t.
MRVETAVWVAVSLGVLYLTWETISPILSPIIIAATTAYILYPVHERLEGKIGGRWSALTLTGILTVVSLLFVFGFALLINDVKYSLANYVDTFVGWLLGLNLPPSAYEVLQRISLGISQRFNSYVLGYTYSLPTLLLQVIVTVFSFYGILVNADAIKQEVYSLIPPTNRDLARKLIDSGAETLHIVLRGWLLVGVGKGILMALFFRVFGISDVGGAVAAGILTVVIELLPVVGGWIVWVGGVAYLINQGHILSGVLLAVLGFSLVSPLPDILLRDKISRLKWGVNAIISLLGFIGGYIAFGFVGIIIGPVSLGLLKTLVEEWKEIKERTS

SEQ ID NO: 1681 - protein, 737 aa, Thermococcus kodakaraensis KOD1
  misc_feature (321437)..(321437): n is a or c or g or t.
  misc_feature (527833)..(527833): n is a or c or g or t.
  misc_feature (527901)..(527901): n is a or c or g or t.
  misc_feature (527978)..(527978): n is a or c or g or t.
  misc_feature (960838)..(960839): n is a or c or g or t.
  misc_feature (960860)..(960861): n is a or c or g or t.
  misc_feature (960872)..(960873): n is a or c or g or t.
  misc_feature (960879)..(960879): n is a or c or g or t.
  misc_feature (960890)..(960890): n is a or c or g or t.
  misc_feature (1250239)..(1250239): n is a or c or g or t.
  misc_feature (1302432)..(1302434): n is a or c or g or t.
  misc_feature (1302471)..(1302471): n is a or c or g or t.
  misc_feature (1302488)..(1302488): n is a or c or g or t.
  misc_feature (1674836)..(1674836): n is a or c or g or t.
MRTMARVKTLTFAVFLLILLAGQATALSIEVGIDEVLIVDGQVFTFDPGQSGDRFLVSVSSHGEETYSVLAFGENITVGNVTYVIGSYDRQNQRLTAHILGNYTSVRVMKKYDFGVEVIEAFDTYAKVKIKNTGFYPLNDTLSVSSSSQGAFPISSSTVLKEVELNLAPGEEIVFKVPNPGQTLVFSLKEKGISKDVFLGTLEPQVEIEEITGSKGVKVKVLNKGDPVNATFSLLYSSNMVLESKKILLQRGTSWVEFSNFINQGAVVVDYGKVIQQTFYFRPALLVLENISREGEHLRVVLKNTGESPFRGFVSVTQNGVVVGSPTYSEVSIGPGESVSLTFKVPEEVRYPTILASSDSGTFSFTAEAGASGISVEALSTSIKVPLGGKGSYALVLSGSGRVKLGVEGLPESVGWKFYSGESEVEELNVDGSAQVVLVIDVPSLPRGFSVGVPVGFNVTVRDENGNLHVIPLEFEAYGLAFLPVYGDNWLAKMNFTAETHFVGIPYRVAAKSLTPPIQFEHYPGEKIAFSYGNYVRSGLDITLHVLSSSGEILHSSSQGKGRPDFVVFNESDFMLMLEGDRFDAVLLVADYLRKPENISFELLPKQFGEGIKTFILNATSLRGKKLALDVNADRPVEVRVYYFTLNREREDFDPLSADFKGAFRGKGEHVSGEVPLRPYEDFVAISIIGTGNVSLTMTAKEVPVSVSGIGKYSGELTVALLALLLVVVIALERRLG

SEQ ID NO: 1682 - protein, 105 aa, Thermococcus kodakaraensis KOD1
  misc_feature (321437)..(321437): n is a or c or g or t.
  misc_feature (527833)..(527833): n is a or c or g or t.
  misc_feature (527901)..(527901): n is a or c or g or t.
  misc_feature (527978)..(527978): n is a or c or g or t.
  misc_feature (960838)..(960839): n is a or c or g or t.
  misc_feature (960860)..(960861): n is a or c or g or t.
  misc_feature (960872)..(960873): n is a or c or g or t.
  misc_feature (960879)..(960879): n is a or c or g or t.
  misc_feature (960890)..(960890): n is a or c or g or t.
  misc_feature (1250239)..(1250239): n is a or c or g or t.
  misc_feature (1302432)..(1302434): n is a or c or g or t.
  misc_feature (1302471)..(1302471): n is a or c or g or t.
  misc_feature (1302488)..(1302488): n is a or c or g or t.
  misc_feature (1674836)..(1674836): n is a or c or g or t.
MLTNVNGVSKSRVMIMADVETKTTVEKEGYLVIGKAEGIVEIDIDTFLCKGCGICVEMCPRKVFEWSKELSEKGVHYPVPVNAEKCVKCKLCELLCPDFAIAVRW

SEQ ID NO: 1683 - protein, 396 aa, Thermococcus kodakaraensis KOD1
  misc_feature (321437)..(321437): n is a or c or g or t.
  misc_feature (527833)..(527833): n is a or c or g or t.
  misc_feature (527901)..(527901): n is a or c or g or t.
  misc_feature (527978)..(527978): n is a or c or g or t.
  misc_feature (960838)..(960839): n is a or c or g or t.
  misc_feature (960860)..(960861): n is a or c or g or t.
  misc_feature (960872)..(960873): n is a or c or g or t.
  misc_feature (960879)..(960879): n is a or c or g or t.
  misc_feature (960890)..(960890): n is a or c or g or t.
  misc_feature (1250239)..(1250239): n is a or c or g or t.
  misc_feature (1302432)..(1302434): n is a or c or g or t.
  misc_feature (1302471)..(1302471): n is a or c or g or t.
  misc_feature (1302488)..(1302488): n is a or c or g or t.
  misc_feature (1674836)..(1674836): n is a or c or g or t.
MIIRGDEPEQIRLIKKLYKPGNYFMQGNEAVAYGAIFAGCRFYAGYPITPSSEIAETMARELPKLGGYYLQMEDEIGSIAAMVGASWTGLKVMTATAGPGFSLMQENLGYAVMTETPLVLVDVQRSGPSTGQATKGAQGDFFQARWGTHGDHPIIALSPTSGQDAFWEIIRAFNIAERLRTPVVMLFDGVLAHTRELVKIPDVEEVEITYRKLPQNEEEARLPFGDPHGDGVPPMPLFGHGYFTHVTGSTHKENGLRDVYTPEVHDRLVRRLHRKIEQNRHVYEKYEEYFTDDAEILVVSWGVTARPALGAVLKAREEGIKAGLFVPKTVHPFPGERMRALGKKVRAVLVPEMNLGQMILEVQRYVNDDVLLKGVNKIGGVPLTVNEILREIRGVA

SEQ ID NO: 1684 - protein, 107 aa, Thermococcus kodakaraensis KOD1
  misc_feature (321437)..(321437): n is a or c or g or t.
  misc_feature (527833)..(527833): n is a or c or g or t.
  misc_feature (527901)..(527901): n is a or c or g or t.
  misc_feature (527978)..(527978): n is a or c or g or t.
  misc_feature (960838)..(960839): n is a or c or g or t.
  misc_feature (960860)..(960861): n is a or c or g or t.
  misc_feature (960872)..(960873): n is a or c or g or t.
  misc_feature (960879)..(960879): n is a or c or g or t.
  misc_feature (960890)..(960890): n is a or c or g or t.
  misc_feature (1250239)..(1250239): n is a or c or g or t.
  misc_feature (1302432)..(1302434): n is a or c or g or t.
  misc_feature (1302471)..(1302471): n is a or c or g or t.
  misc_feature (1302488)..(1302488): n is a or c or g or t.
  misc_feature (1674836)..(1674836): n is a or c or g or t.
MKFKSTLGLRVKMMEFEAIGRRLREAFGDRVEEVIIFGSRVRGDHREDSDLDVLLVLKDEIKAEDWDEIGKLSAELTLELGISVMIMPHTSKKDSLYNTAKTEGIAV

SEQ ID NO: 1685 - protein, 187 aa, Thermococcus kodakaraensis KOD1
  misc_feature (321437)..(321437): n is a or c or g or t.
  misc_feature (527833)..(527833): n is a or c or g or t.
  misc_feature (527901)..(527901): n is a or c or g or t.
  misc_feature (527978)..(527978): n is a or c or g or t.
  misc_feature (960838)..(960839): n is a or c or g or t.
  misc_feature (960860)..(960861): n is a or c or g or t.
  misc_feature (960872)..(960873): n is a or c or g or t.
  misc_feature (960879)..(960879): n is a or c or g or t.
  misc_feature (960890)..(960890): n is a or c or g or t.
  misc_feature (1250239)..(1250239): n is a or c or g or t.
  misc_feature (1302432)..(1302434): n is a or c or g or t.
  misc_feature (1302471)..(1302471): n is a or c or g or t.
  misc_feature (1302488)..(1302488): n is a or c or g or t.
  misc_feature (1674836)..(1674836): n is a or c or g or t.
MLRSFWLSQNLIWRVRTMQIRLAGIGGQGVVLAGVILGEAAAIEGLNVLQTQDYSSASRGGHSIADVIISKEPIYDVMVTEADVLVALHQLGYDTVKDSLKEDGLLIIDTDLVKPDRDYIGAPFTRLAEETTGLALTVNMVALGYLVAKTGVVKKENVEEAIRRRVPKGTEEINLRAFRAGYEEGLK

SEQ ID NO: 1686 - protein, 189 aa, Thermococcus kodakaraensis KOD1
  misc_feature (321437)..(321437): n is a or c or g or t.
  misc_feature (527833)..(527833): n is a or c or g or t.
  misc_feature (527901)..(527901): n is a or c or g or t.
  misc_feature (527978)..(527978): n is a or c or g or t.
  misc_feature (960838)..(960839): n is a or c or g or t.
  misc_feature (960860)..(960861): n is a or c or g or t.
  misc_feature (960872)..(960873): n is a or c or g or t.
  misc_feature (960879)..(960879): n is a or c or g or t.
  misc_feature (960890)..(960890): n is a or c or g or t.
  misc_feature (1250239)..(1250239): n is a or c or g or t.
  misc_feature (1302432)..(1302434): n is a or c or g or t.
  misc_feature (1302471)..(1302471): n is a or c or g or t.
  misc_feature (1302488)..(1302488): n is a or c or g or t.
  misc_feature (1674836)..(1674836): n is a or c or g or t.
VGRMRKEVLFSGFGGQGVILASVILGRAAAVYEGLYAVQTQAYGPESRGGASKAEVVISDEPIDYPKTLSPDYAVFFSQEAYTKYLHTVKEGAKVIVEKDLVPHRDLEFEKNLDVLALPLTEIAEETTGLSLTMNILALGVLTAWTEIVSREAIEKAVLDAVPKGTEQINLRALHKGFELGEKAKRGEL

SEQ ID NO: 1687 - protein, 17 aa, Thermococcus kodakaraensis KOD1
  misc_feature (321437)..(321437): n is a or c or g or t.
  misc_feature (527833)..(527833): n is a or c or g or t.
  misc_feature (527901)..(527901): n is a or c or g or t.
  misc_feature (527978)..(527978): n is a or c or g or t.
  misc_feature (960838)..(960839): n is a or c or g or t.
  misc_feature (960860)..(960861): n is a or c or g or t.
  misc_feature (960872)..(960873): n is a or c or g or t.
  misc_feature (960879)..(960879): n is a or c or g or t.
  misc_feature (960890)..(960890): n is a or c or g or t.
  misc_feature (1250239)..(1250239): n is a or c or g or t.
  misc_feature (1302432)..(1302434): n is a or c or g or t.
  misc_feature (1302471)..(1302471): n is a or c or g or t.
  misc_feature (1302488)..(1302488): n is a or c or g or t.
  misc_feature (1674836)..(1674836): n is a or c or g or t.
MVKNLAENNVVYENPPV

SEQ ID NO: 1688 - protein, 88 aa, Thermococcus kodakaraensis KOD1
  misc_feature (321437)..(321437): n is a or c or g or t.
  misc_feature (527833)..(527833): n is a or c or g or t.
  misc_feature (527901)..(527901): n is a or c or g or t.
  misc_feature (527978)..(527978): n is a or c or g or t.
  misc_feature (960838)..(960839): n is a or c or g or t.
  misc_feature (960860)..(960861): n is a or c or g or t.
  misc_feature (960872)..(960873): n is a or c or g or t.
  misc_feature (960879)..(960879): n is a or c or g or t.
  misc_feature (960890)..(960890): n is a or c or g or t.
  misc_feature (1250239)..(1250239): n is a or c or g or t.
  misc_feature (1302432)..(1302434): n is a or c or g or t.
  misc_feature (1302471)..(1302471): n is a or c or g or t.
  misc_feature (1302488)..(1302488): n is a or c or g or t.
  misc_feature (1674836)..(1674836): n is a or c or g or t.
VRPMGRGMTVDANRVIAGGVLVFVEPETFKKFLELKERPLVIVGETGGFKKVKLTMTTYDGALIITRGEVELSETAIVVKARELSLGK

SEQ ID NO: 1689 - protein, 227 aa, Thermococcus kodakaraensis KOD1
  misc_feature (321437)..(321437): n is a or c or g or t.
  misc_feature (527833)..(527833): n is a or c or g or t.
  misc_feature (527901)..(527901): n is a or c or g or t.
  misc_feature (527978)..(527978): n is a or c or g or t.
  misc_feature (960838)..(960839): n is a or c or g or t.
  misc_feature (960860)..(960861): n is a or c or g or t.
  misc_feature (960872)..(960873): n is a or c or g or t.
  misc_feature (960879)..(960879): n is a or c or g or t.
  misc_feature (960890)..(960890): n is a or c or g or t.
  misc_feature (1250239)..(1250239): n is a or c or g or t.
  misc_feature (1302432)..(1302434): n is a or c or g or t.
  misc_feature (1302471)..(1302471): n is a or c or g or t.
  misc_feature (1302488)..(1302488): n is a or c or g or t.
  misc_feature (1674836)..(1674836): n is a or c or g or t.
MNYLRYVKIIGTMHVSPKSRDEVFRTILKERPHAVAVELDRARFIGMQQKIEMTLSDSLRLGRKGVINYVLAKVEEKLGETFGMAPGEEMKAAIEAARAIGVPLYLIDEDIGLILAKISRAPVREKLLMALESLGVFLPIKAVDIGDPFEEYRWMMLEFRRRYPYLYRVLVEERNEVMARNLMMIVDSLLAGGVQRPKVVAVVGLGHKPGIERILNRGKTEPVTFIF

SEQ ID NO: 1690 - protein, 484 aa, Thermococcus kodakaraensis KOD1
  misc_feature (321437)..(321437): n is a or c or g or t.
  misc_feature (527833)..(527833): n is a or c or g or t.
  misc_feature (527901)..(527901): n is a or c or g or t.
  misc_feature (527978)..(527978): n is a or c or g or t.
  misc_feature (960838)..(960839): n is a or c or g or t.
  misc_feature (960860)..(960861): n is a or c or g or t.
  misc_feature (960872)..(960873): n is a or c or g or t.
  misc_feature (960879)..(960879): n is a or c or g or t.
  misc_feature (960890)..(960890): n is a or c or g or t.
  misc_feature (1250239)..(1250239): n is a or c or g or t.
  misc_feature (1302432)..(1302434): n is a or c or g or t.
  misc_feature (1302471)..(1302471): n is a or c or g or t.
  misc_feature (1302488)..(1302488): n is a or c or g or t.
  misc_feature (1674836)..(1674836): n is a or c or g or t.
MGKSRSSTTRAGRSSPKSLLVLSLFSLLVIHVNWDGLYASAFERIRDNIGKVGNVLLAYNTNIDAIKYLEREDLERRIGAAGREEVLPYSEKLPKRIESVPQLLGSILWSIRRGKAAELFVESCSTRFYMRRWGWDELRMGGQVGIMANLLGGVYGVPVIAHVPQLSRLQAELFKDGPIYVPKVEGGKLKLVHPKEFKADEENCIHYIYEFPRGFRVFDFEAPRENRFIGSADDYNTNVVIRPEFEEHFGEIAEKTELAIISGLQALTEGNYREPFETIKEHLDVLEGKGIPAHLEFAFTPDETVRKEILGVLGKFWSVGLNEVELASIMDVMGEKTLAEKLLAHDPVDPIVVTKAMLKLAEKTGVRRIHFHTYGYYLALTDYRGEFVRDALLFAALAAAAKAKLGDVRNIDDVVKAMDVPVNEKAKGVEEALTKEYGMENGIAEVNGYQLAFIPTKIVAKPKSTVGIGDTISSSAFVGEFALR

SEQ ID NO: 1691 - protein, 462 aa, Thermococcus kodakaraensis KOD1
  misc_feature (321437)..(321437): n is a or c or g or t.
  misc_feature (527833)..(527833): n is a or c or g or t.
  misc_feature (527901)..(527901): n is a or c or g or t.
  misc_feature (527978)..(527978): n is a or c or g or t.
  misc_feature (960838)..(960839): n is a or c or g or t.
  misc_feature (960860)..(960861): n is a or c or g or t.
  misc_feature (960872)..(960873): n is a or c or g or t.
  misc_feature (960879)..(960879): n is a or c or g or t.
  misc_feature (960890)..(960890): n is a or c or g or t.
  misc_feature (1250239)..(1250239): n is a or c or g or t.
  misc_feature (1302432)..(1302434): n is a or c or g or t.
  misc_feature (1302471)..(1302471): n is a or c or g or t.
  misc_feature (1302488)..(1302488): n is a or c or g or t.
  misc_feature (1674836)..(1674836): n is a or c or g or t.
VIGVVAMGKLFGTFGVRGIANEEITPEFALKIGMAFGTLLKREGRERPLVVVGRDTRVSGEMLKDALISGLLSTGCDVIDVGIAPTPAIQWATNHFNADGGAVITASHNPPEYNGIKLLEPNGMGLKKEREAIVEELFFSEDFHRAKWNEIGELRKEDIIKPYIEAIKNRVDVEAIKKRRPFVVVDTSNGAGSLTLPYLLRELGCKVVSVNAHPDGHFPARNPEPNEENLKGFMEIVKALGADFGVAQDGDADRAVFIDENGRFIQGDKTFALVADAVLRENGGGLLVTTIATSNLLDDIAKRNGAKVMRTKVGDLIVARALLENNGTIGGEENGGVIFPDFVLGRDGAMTTAKIVEIFAKSGKKFSELIDELPKYYQFKTKRHVEGDRKAIVAKVAELAEKKGYKIDTTDGTKIIFDDGWVLVRASGTEPIIRIFSEAKSEEKAREYLELGIKLLEEALKG

SEQ ID NO: 1692 - protein, 1123 aa, Thermococcus kodakaraensis KOD1
  misc_feature (321437)..(321437): n is a or c or g or t.
  misc_feature (527833)..(527833): n is a or c or g or t.
  misc_feature (527901)..(527901): n is a or c or g or t.
  misc_feature (527978)..(527978): n is a or c or g or t.
  misc_feature (960838)..(960839): n is a or c or g or t.
  misc_feature (960860)..(960861): n is a or c or g or t.
  misc_feature (960872)..(960873): n is a or c or g or t.
  misc_feature (960879)..(960879): n is a or c or g or t.
  misc_feature (960890)..(960890): n is a or c or g or t.
  misc_feature (1250239)..(1250239): n is a or c or g or t.
  misc_feature (1302432)..(1302434): n is a or c or g or t.
  misc_feature (1302471)..(1302471): n is a or c or g or t.
  misc_feature (1302488)..(1302488): n is a or c or g or t.
  misc_feature (1674836)..(1674836): n is a or c or g or t.
MSRGVTVTEPTLTPDELWLVMESYWKEKGFVRQHLDSYNAFIDHGLQDVVNEFGEVVPDIPNFKVKFGKIRIGQPEFQEAQGQRRPLYPMDARIRNLTYSAPLYLEMIPVVNGIEQEPVEVRIGELPIMLKSKACRLYGLSDEELIKLGEDPKDPGGYFIINGSERVIVSIEDLAPNKTLVERDERQNKVVAKVFSYRHGYRALITVERKKDGILYVTIPNVPKPVKFVYVMRALGLLTDKEIVEAVSDDPRIQQVLFDNLEDASDISTQEEALDYIGRLALPGQPKEYRLRRAEHIIDNNLLPHMGVDPENRRAKAYYLGMMALKVLELSLGLRGEDDKDHYANKRLKLAGDLLKDLFRVAFGQLVKDMQYQMTKTYQRKGERYTFENIQRFVRNSIRPDVLSERIEHALATGSWPGGRTGVSQLLDRTNYMSTLSHLRRVTSPLSRDQPHFEARDLHGTHWGRICPTETPEGPNCGLVKNLALMSQITTGIPEREVREYLMKMGVVPIEERRPAPGLYRVYLNGVLIGTVEDGRKLVERIRADRRAGKISDVINVALYEDEEVKEVYINSDDGRVRRPLIVVENGKPKLTREHVEGIKNGTLTWSDLIRMGVIEYLDAEEEENAYVATWPWEVTEEHTHLELMPAAILGIPASLVPYPEHNAAPRNTYGAGMAKQSLGLGWANFRIRVDTRGHLMHYPQVPLVNSRIMKAVGFEDRPAGQNFVVAVLSYHGYNMEDAVIINKASIERGLARSTFFRTYEAEEKRYLGGQKDNFEVPSPNIQGYLGEKYYRHLDEDGLIFPESKVEGKDVLVGRTSPPRFIEEQSSLGSMVLQGRRETSVTVRPSEKGVVDKVIVTETGDGTKLVKVTVRDLRIPELGDKFASRHGQKGVIGLIVPQEDMPWTESGIVPDLIVNPHGIPSRMTVGQLIEAIGGKVASLTGRRVDGTAFIGEPEEKLRKELEELGFKHSGREIMYDGITGRRLEADIFIGVIYYQRLHHMVADKMHARSRGPVQVLTKQPTEGRAREGGLRFGEMERDVLIGHGAAMLLIERLLEESDKTEVWVCESCGHLALEDKRRGKVYCPVCGEDERISKVEMSYAFKLLLDELKAMVIRPSLRLKDRV

SEQ ID NO: 1693 - protein, 410 aa, Thermococcus kodakaraensis KOD1
  misc_feature (321437)..(321437): n is a or c or g or t.
  misc_feature (527833)..(527833): n is a or c or g or t.
  misc_feature (527901)..(527901): n is a or c or g or t.
  misc_feature (527978)..(527978): n is a or c or g or t.
  misc_feature (960838)..(960839): n is a or c or g or t.
  misc_feature (960860)..(960861): n is a or c or g or t.
  misc_feature (960872)..(960873): n is a or c or g or t.
  misc_feature (960879)..(960879): n is a or c or g or t.
  misc_feature (960890)..(960890): n is a or c or g or t.
  misc_feature (1250239)..(1250239): n is a or c or g or t.
  misc_feature (1302432)..(1302434): n is a or c or g or t.
  misc_feature (1302471)..(1302471): n is a or c or g or t.
  misc_feature (1302488)..(1302488): n is a or c or g or t.
  misc_feature (1674836)..(1674836): n is a or c or g or t.
VVRSSREFRTTSLEATSSPGRAHYFTRYEVEQMLMFAGMDVNELPEPDKYENGEPLWSGKTIFSLLLPDDLTIWYRNKLCDEPERCEALEKLIEEKLIPDPEEVRKLAYDGFVYIQNGKLLSGAVDKKAYGREDGKLLDIIVREYGVERARQFLDQVTKLTIWVITHKGFTTAIDDEDLPQEAIDRIHEIIREAEEKVQRLIEAYKRGELEPLPGKTLEETLESKIMAVLAEARDNAGKVAERYLGMNNHAVIMAKTGARGKILNITQMAAMLGQQSIRGKRLYRGYRGRVLTHFKPGDLGARARGFVTNSYKSGLTPQEYFFHAMGGREGLVDTAVRTAQSGYMQRRLINALQDLKVDYDGTVRDPTGIIVQFKYGEDGVDPMKSWQGKTVDVDRVIVRTLLKMRGGGE

SEQ ID NO: 1694 - protein, 81 aa, Thermococcus kodakaraensis KOD1
  misc_feature (321437)..(321437): n is a or c or g or t.
  misc_feature (527833)..(527833): n is a or c or g or t.
  misc_feature (527901)..(527901): n is a or c or g or t.
  misc_feature (527978)..(527978): n is a or c or g or t.
  misc_feature (960838)..(960839): n is a or c or g or t.
  misc_feature (960860)..(960861): n is a or c or g or t.
  misc_feature (960872)..(960873): n is a or c or g or t.
  misc_feature (960879)..(960879): n is a or c or g or t.
  misc_feature (960890)..(960890): n is a or c or g or t.
  misc_feature (1250239)..(1250239): n is a or c or g or t.
  misc_feature (1302432)..(1302434): n is a or c or g or t.
  misc_feature (1302471)..(1302471): n is a or c or g or t.
  misc_feature (1302488)..(1302488): n is a or c or g or t.
  misc_feature (1674836)..(1674836): n is a or c or g or t.
MVTVKVSSKGQIVLPKSIREKLGINPGDEVEVLDFGDEIVIVPVKKNVDLMGILKFDKPLKDVMREVREEERELEARKWGE

SEQ ID NO: 1695 - protein, 611 aa, Thermococcus kodakaraensis KOD1
  misc_feature (321437)..(321437): n is a or c or g or t.
  misc_feature (527833)..(527833): n is a or c or g or t.
  misc_feature (527901)..(527901): n is a or c or g or t.
  misc_feature (527978)..(527978): n is a or c or g or t.
  misc_feature (960838)..(960839): n is a or c or g or t.
  misc_feature (960860)..(960861): n is a or c or g or t.
  misc_feature (960872)..(960873): n is a or c or g or t.
  misc_feature (960879)..(960879): n is a or c or g or t.
  misc_feature (960890)..(960890): n is a or c or g or t.
  misc_feature (1250239)..(1250239): n is a or c or g or t.
  misc_feature (1302432)..(1302434): n is a or c or g or t.
  misc_feature (1302471)..(1302471): n is a or c or g or t.
  misc_feature (1302488)..(1302488): n is a or c or g or t.
  misc_feature (1674836)..(1674836): n is a or c or g or t.
MFRGVFMYGNWGRFLRVNLSTGEVKVEEYGEELAKKWLGSRGLAIYLLLKEMDPKADPLGPENKLIITPGPLTGTSAPTGGRYNVVTKSPQTGFITMANSGGYFGAELKFAGWDAIVVEGQSEKPVYIYIKDDHVEIRDASHLWGKVVSETEAAIKKEIGSNKLHIASIGPAGENLVKFAAIMNDGHRAAGRAGVGAVMGSKKLKAIAVEGSKRVPIADKQKFMLVVREKINKLRNDPVAGGGLPKYGTAVLVNIINENGLYPTRNFQTGVFEHAYEQSGEAMTAKYLIRNQPCYACPIGCGRVNKLPTLGVTEGPEYESIWALGANLGINDLASIIEANHQCDEFGLDTISTGGTLAAAMELYEKGYLTDDELGDAPPFRWGNTEVLHYYIEKIAYRKDLGDKLAEGSYRFAEMYGHPEFSMSVKKLELPAYDPRGAEGHGLGYATNNRGGCHIKNYMISPEILGYPYKMDPHDISDEKVKMLILFQDLSALIDAAGLCLFTTFGLGADDYRDMLNAALGWDFSTEDYLKIGERIWNAERLFNLKAGLDPAKDETLPKRFLEEPMPEGPNKGHVVRLKEMLPRYYKLRGWTEDGRIPREKAEELGIAEFL

SEQ ID NO: 1696 - protein, 92 aa, Thermococcus kodakaraensis KOD1
  misc_feature (321437)..(321437): n is a or c or g or t.
  misc_feature (527833)..(527833): n is a or c or g or t.
  misc_feature (527901)..(527901): n is a or c or g or t.
  misc_feature (527978)..(527978): n is a or c or g or t.
  misc_feature (960838)..(960839): n is a or c or g or t.
  misc_feature (960860)..(960861): n is a or c or g or t.
  misc_feature (960872)..(960873): n is a or c or g or t.
  misc_feature (960879)..(960879): n is a or c or g or t.
  misc_feature (960890)..(960890): n is a or c or g or t.
  misc_feature (1250239)..(1250239): n is a or c or g or t.
  misc_feature (1302432)..(1302434): n is a or c or g or t.
  misc_feature (1302471)..(1302471): n is a or c or g or t.
  misc_feature (1302488)..(1302488): n is a or c or g or t.
  misc_feature (1674836)..(1674836): n is a or c or g or t.
MLRTRFKVVHVLVKLFATLIEFTGKRKLEISGPKTVRELLNELDRMFPGFKKELEQGYIILVNGKNIEHLQGLDTPLKEDDTVSIFPPAGGG

SEQ ID NO: 1697 - protein, 177 aa, Thermococcus kodakaraensis KOD1
  misc_feature (321437)..(321437): n is a or c or g or t.
  misc_feature (527833)..(527833): n is a or c or g or t.
  misc_feature (527901)..(527901): n is a or c or g or t.
  misc_feature (527978)..(527978): n is a or c or g or t.
  misc_feature (960838)..(960839): n is a or c or g or t.
  misc_feature (960860)..(960861): n is a or c or g or t.
  misc_feature (960872)..(960873): n is a or c or g or t.
  misc_feature (960879)..(960879): n is a or c or g or t.
  misc_feature (960890)..(960890): n is a or c or g or t.
  misc_feature (1250239)..(1250239): n is a or c or g or t.
  misc_feature (1302432)..(1302434): n is a or c or g or t.
  misc_feature (1302471)..(1302471): n is a or c or g or t.
  misc_feature (1302488)..(1302488): n is a or c or g or t.
  misc_feature (1674836)..(1674836): n is a or c or g or t.
MRIERVKNPLSLKDELLKFVFRVYQSTNGAYPALEWVENKPSPDDFDGFKKVYEPFLEFRLGKEFDELYVLRDNDGKIAGTVALVYNLEGKDVWWVPEEIKDEKTGLIEFFMVHPDYKGKGYGSKLLGFAIERLKNLGKDPYIITFPNLEAYEYYLRRGFVKVMDYRGFVVLKYRGG

SEQ ID NO: 1698 - protein, 93 aa, Thermococcus kodakaraensis KOD1
  misc_feature (321437)..(321437): n is a or c or g or t.
  misc_feature (527833)..(527833): n is a or c or g or t.
  misc_feature (527901)..(527901): n is a or c or g or t.
  misc_feature (527978)..(527978): n is a or c or g or t.
  misc_feature (960838)..(960839): n is a or c or g or t.
  misc_feature (960860)..(960861): n is a or c or g or t.
  misc_feature (960872)..(960873): n is a or c or g or t.
  misc_feature (960879)..(960879): n is a or c or g or t.
  misc_feature (960890)..(960890): n is a or c or g or t.
  misc_feature (1250239)..(1250239): n is a or c or g or t.
  misc_feature (1302432)..(1302434): n is a or c or g or t.
  misc_feature (1302471)..(1302471): n is a or c or g or t.
  misc_feature (1302488)..(1302488): n is a or c or g or t.
  misc_feature (1674836)..(1674836): n is a or c or g or t.
MNELFEKVREEFGIEVKDEKDMTNAWKLVEMLEDKGWVIYIITAKGRKQVDAWHPNFGSLFAQFGENPGFGSILEGICNVALLVRELEKHGKV

SEQ ID NO: 1699 - protein, 350 aa, Thermococcus kodakaraensis KOD1
  misc_feature (321437)..(321437): n is a or c or g or t.
  misc_feature (527833)..(527833): n is a or c or g or t.
  misc_feature (527901)..(527901): n is a or c or g or t.
  misc_feature (527978)..(527978): n is a or c or g or t.
  misc_feature (960838)..(960839): n is a or c or g or t.
  misc_feature (960860)..(960861): n is a or c or g or t.
  misc_feature (960872)..(960873): n is a or c or g or t.
  misc_feature (960879)..(960879): n is a or c or g or t.
  misc_feature (960890)..(960890): n is a or c or g or t.
  misc_feature (1250239)..(1250239): n is a or c or g or t.
  misc_feature (1302432)..(1302434): n is a or c or g or t.
  misc_feature (1302471)..(1302471): n is a or c or g or t.
  misc_feature (1302488)..(1302488): n is a or c or g or t.
  misc_feature (1674836)..(1674836): n is a or c or g or t.
MKEKVVALFMVMIMLASTGAVVLADSVTSSSGESEVLRDDVNNETNSTANSTLGLLKVVDRLANYTAQRISTSNVSNETLSVYNRANELREKAWEAYRLGNHTETVRYAIEAMHLYKEVIMTLKQGAAAGEEEKEISPGMEMWKLQNAVRVQLEMAVRELKYAELIMNRTNVTPEFVSAYNLTKTLVEKVEEDLTSGNFTLLKEDFPELVQARAELHRQIILVTSRTFKVQAVKAVGRQLKALDELMPKLMGINEAVIENMSRIRENRNVIANLTEKIQELKALRRELEQASLRGDRERVQELLVEINRKLMEIRILLMKNMRMGNLPWKPPITPNPGRGHDKAHSSERP

SEQ ID NO: 1700 - protein, 109 aa, Thermococcus kodakaraensis KOD1
  misc_feature (321437)..(321437): n is a or c or g or t.
  misc_feature (527833)..(527833): n is a or c or g or t.
  misc_feature (527901)..(527901): n is a or c or g or t.
  misc_feature (527978)..(527978): n is a or c or g or t.
  misc_feature (960838)..(960839): n is a or c or g or t.
  misc_feature (960860)..(960861): n is a or c or g or t.
  misc_feature (960872)..(960873): n is a or c or g or t.
  misc_feature (960879)..(960879): n is a or c or g or t.
  misc_feature (960890)..(960890): n is a or c or g or t.
  misc_feature (1250239)..(1250239): n is a or c or g or t.
  misc_feature (1302432)..(1302434): n is a or c or g or t.
  misc_feature (1302471)..(1302471): n is a or c or g or t.
  misc_feature (1302488)..(1302488): n is a or c or g or t.
  misc_feature (1674836)..(1674836): n is a or c or g or t.
VLLAVVVGALWYFKGKTGGNENSDDTTSIVQKINREELEKKLDSMNLNDEEKKALLYIYDRGGVARQSDVRNELGIPKTTAWRMFQRLEKQGLVRVYKKGRENWVELTL

SEQ ID NO: 1701 - protein, 290 aa, Thermococcus kodakaraensis KOD1
  misc_feature (321437)..(321437): n is a or c or g or t.
  misc_feature (527833)..(527833): n is a or c or g or t.
  misc_feature (527901)..(527901): n is a or c or g or t.
  misc_feature (527978)..(527978): n is a or c or g or t.
  misc_feature (960838)..(960839): n is a or c or g or t.
  misc_feature (960860)..(960861): n is a or c or g or t.
  misc_feature (960872)..(960873): n is a or c or g or t.
  misc_feature (960879)..(960879): n is a or c or g or t.
  misc_feature (960890)..(960890): n is a or c or g or t.
  misc_feature (1250239)..(1250239): n is a or c or g or t.
  misc_feature (1302432)..(1302434): n is a or c or g or t.
  misc_feature (1302471)..(1302471): n is a or c or g or t.
  misc_feature (1302488)..(1302488): n is a or c or g or t.
  misc_feature (1674836)..(1674836): n is a or c or g or t.
MIIVTDSERKIRLPFSRGILTRSITLAGIDVGIAYAIATEVQKELEWKGKKSVTTEEIRELTYQKLLEKGLREEAKRYLFWRELRRRKVRLTVLLGGATGVGKSTIATELAFRLGIRSIIGTDTIREVMRKIIAKELLPDIHVSSFLAERVVKAPKNSDPLIYGFETQVKHVSVGIKAVLERARREGLNTLIEGIHVVPGFVEPREDEFMYVIAVPKKDYLIAHFYERARYSQRDAEKYVKHVDRIMRIQDYLVERAREHGIPVIENVELESTVSTILADMMKKLEEMGV

SEQ ID NO: 1702 - protein, 296 aa, Thermococcus kodakaraensis KOD1
  misc_feature (321437)..(321437): n is a or c or g or t.
  misc_feature (527833)..(527833): n is a or c or g or t.
  misc_feature (527901)..(527901): n is a or c or g or t.
  misc_feature (527978)..(527978): n is a or c or g or t.
  misc_feature (960838)..(960839): n is a or c or g or t.
  misc_feature (960860)..(960861): n is a or c or g or t.
  misc_feature (960872)..(960873): n is a or c or g or t.
  misc_feature (960879)..(960879): n is a or c or g or t.
  misc_feature (960890)..(960890): n is a or c or g or t.
  misc_feature (1250239)..(1250239): n is a or c or g or t.
  misc_feature (1302432)..(1302434): n is a or c or g or t.
  misc_feature (1302471)..(1302471): n is a or c or g or t.
  misc_feature (1302488)..(1302488): n is a or c or g or t.
  misc_feature (1674836)..(1674836): n is a or c or g or t.
MKRAWAMMLGLESAVLTVMSRIGKHRSLYEKNEEAVKQHLIGEIMTALGWEWNNPEEVRPEERTEDGRADYALFLNGETVAFLEAKNLGVNILKRDEPLRQLARYCFSRGVKYGILSNGAVWIALKAFAEGTSLKDRVLFVVNLEEEPLERAVLKLSMLSKENLPKVEKLATLLKALEAAYSTLVSEGFSGDSLLHYLQARGPALLPVSALSGGEVVKALYIYENGWKPVPLGDRTLKGILLAVLDYLEARSEGRKAEEIKKVKKFLSSTEIPEEKILTILRGIEEDEGLKLAVEL

SEQ ID NO: 1703 - protein, 67 aa, Thermococcus kodakaraensis KOD1
  misc_feature (321437)..(321437): n is a or c or g or t.
  misc_feature (527833)..(527833): n is a or c or g or t.
  misc_feature (527901)..(527901): n is a or c or g or t.
  misc_feature (527978)..(527978): n is a or c or g or t.
  misc_feature (960838)..(960839): n is a or c or g or t.
  misc_feature (960860)..(960861): n is a or c or g or t.
  misc_feature (960872)..(960873): n is a or c or g or t.
  misc_feature (960879)..(960879): n is a or c or g or t.
  misc_feature (960890)..(960890): n is a or c or g or t.
  misc_feature (1250239)..(1250239): n is a or c or g or t.
  misc_feature (1302432)..(1302434): n is a or c or g or t.
  misc_feature (1302471)..(1302471): n is a or c or g or t.
  misc_feature (1302488)..(1302488): n is a or c or g or t.
  misc_feature (1674836)..(1674836): n is a or c or g or t.
MGTVIEAVYDGEKFRPLKKVNLPKGAKVKVIVGETIWDLMESVEGIPVNTDIEEVLDDVRGRKRVRY

SEQ ID NO: 1704 - protein, 252 aa, Thermococcus kodakaraensis KOD1
  misc_feature (321437)..(321437): n is a or c or g or t.
  misc_feature (527833)..(527833): n is a or c or g or t.
  misc_feature (527901)..(527901): n is a or c or g or t.
  misc_feature (527978)..(527978): n is a or c or g or t.
  misc_feature (960838)..(960839): n is a or c or g or t.
  misc_feature (960860)..(960861): n is a or c or g or t.
  misc_feature (960872)..(960873): n is a or c or g or t.
  misc_feature (960879)..(960879): n is a or c or g or t.
  misc_feature (960890)..(960890): n is a or c or g or t.
  misc_feature (1250239)..(1250239): n is a or c or g or t.
  misc_feature (1302432)..(1302434): n is a or c or g or t.
  misc_feature (1302471)..(1302471): n is a or c or g or t.
  misc_feature (1302488)..(1302488): n is a or c or g or t.
  misc_feature (1674836)..(1674836): n is a or c or g or t.
MLKLGKVETYIHEKLEREKLHFVLLDPDDVSPELAGELASMSEEVGVDAIMVGGSTGAEGEVLDSVVRAIKESSNLPVILFPGSHGGISKYADAIFFMSLLNSRNPFFITGAQALGAFQVKRYGIEPIPMAYLIIEPGETVGWVGDAKPIPRHKPKIAAAYALAGQYLGMRLVYLEAGSGAPQPVPPEMIGLVKRVIDVPLIVGGGIRTEEQARAAVKAGADIIVTGTAIEKAGSVEKAREKLEELNRGVKG

SEQ ID NO: 1705 - protein, 44 aa, Thermococcus kodakaraensis KOD1
  misc_feature (321437)..(321437): n is a or c or g or t.
  misc_feature (527833)..(527833): n is a or c or g or t.
  misc_feature (527901)..(527901): n is a or c or g or t.
  misc_feature (527978)..(527978): n is a or c or g or t.
  misc_feature (960838)..(960839): n is a or c or g or t.
  misc_feature (960860)..(960861): n is a or c or g or t.
  misc_feature (960872)..(960873): n is a or c or g or t.
  misc_feature (960879)..(960879): n is a or c or g or t.
  misc_feature (960890)..(960890): n is a or c or g or t.
  misc_feature (1250239)..(1250239): n is a or c or g or t.
  misc_feature (1302432)..(1302434): n is a or c or g or t.
  misc_feature (1302471)..(1302471): n is a or c or g or t.
  misc_feature (1302488)..(1302488): n is a or c or g or t.
  misc_feature (1674836)..(1674836): n is a or c or g or t.
MSFGNGLKIFRFLTWGHKKDLQCFVRTFLRAKIEKTLRKSPYFY

SEQ ID NO: 1706 - protein, 78 aa, Thermococcus kodakaraensis KOD1
  misc_feature (321437)..(321437): n is a or c or g or t.
  misc_feature (527833)..(527833): n is a or c or g or t.
  misc_feature (527901)..(527901): n is a or c or g or t.
  misc_feature (527978)..(527978): n is a or c or g or t.
  misc_feature (960838)..(960839): n is a or c or g or t.
  misc_feature (960860)..(960861): n is a or c or g or t.
  misc_feature (960872)..(960873): n is a or c or g or t.
  misc_feature (960879)..(960879): n is a or c or g or t.
  misc_feature (960890)..(960890): n is a or c or g or t.
  misc_feature (1250239)..(1250239): n is a or c or g or t.
  misc_feature (1302432)..(1302434): n is a or c or g or t.
  misc_feature (1302471)..(1302471): n is a or c or g or t.
  misc_feature (1302488)..(1302488): n is a or c or g or t.
  misc_feature (1674836)..(1674836): n is a or c or g or t.
VKMAERPLDVIHKSLDKDVLVLLKRGNEFRGKLIGYDIHLNVVLADAELIQDGEVVKKYGKIVIRGDNVLALSPVELE

SEQ ID NO: 1707 - protein, 455 aa, Thermococcus kodakaraensis KOD1
  misc_feature (321437)..(321437): n is a or c or g or t.
  misc_feature (527833)..(527833): n is a or c or g or t.
  misc_feature (527901)..(527901): n is a or c or g or t.
  misc_feature (527978)..(527978): n is a or c or g or t.
  misc_feature (960838)..(960839): n is a or c or g or t.
  misc_feature (960860)..(960861): n is a or c or g or t.
  misc_feature (960872)..(960873): n is a or c or g or t.
  misc_feature (960879)..(960879): n is a or c or g or t.
  misc_feature (960890)..(960890): n is a or c or g or t.
  misc_feature (1250239)..(1250239): n is a or c or g or t.
  misc_feature (1302432)..(1302434): n is a or c or g or t.
  misc_feature (1302471)..(1302471): n is a or c or g or t.
  misc_feature (1302488)..(1302488): n is a or c or g or t.
  misc_feature (1674836)..(1674836): n is a or c or g or t.
MFRNETQRKIWALAWPAIVGNISQTLLNLVDTLMVGHVSALAIAAVGLGGQVSWFMFPIMMAVSVGTLALIARFVGAKDYSQAELVLEQSLYLAFLLGIPVMLFGWFFGDEVLWVMGAKGELLRTAYAYLKVVFLFYPIRLVGFTLFSALRGAGDTKTPMKLGIFMNVVNATFDYLLIYGKLGFPRMGAVGAAWASGIGITSSFLIGLYLLLSGKLVLKFRPSWSFHPEMVVRILRIGIPTLVERGLFSFYNFLYMSIVTRFGDVALAAHQIGLRVESIAYMPAFGFNVAASTLVGQNLGAGKPEEAERTVYEALKMVSVFMGVMAIILIAFPRYLVMPFLSSSDPHYHEVLHLASIYLLIVGISEVPLGWVFVLSGALRGAGDTKSPMYVTAISKLLFRIVPSYVFGFGLAVGPFVIEGMGVIAAWLAMTLETFTSAAMYWWIFKKGRWKYVKV

SEQ ID NO: 1708 - protein, 87 aa, Thermococcus kodakaraensis KOD1
  misc_feature (321437)..(321437): n is a or c or g or t.
  misc_feature (527833)..(527833): n is a or c or g or t.
  misc_feature (527901)..(527901): n is a or c or g or t.
  misc_feature (527978)..(527978): n is a or c or g or t.
  misc_feature (960838)..(960839): n is a or c or g or t.
  misc_feature (960860)..(960861): n is a or c or g or t.
  misc_feature (960872)..(960873): n is a or c or g or t.
  misc_feature (960879)..(960879): n is a or c or g or t.
  misc_feature (960890)..(960890): n is a or c or g or t.
  misc_feature (1250239)..(1250239): n is a or c or g or t.
  misc_feature (1302432)..(1302434): n is a or c or g or t.
  misc_feature (1302471)..(1302471): n is a or c or g or t.
  misc_feature (1302488)..(1302488): n is a or c or g or t.
  misc_feature (1674836)..(1674836): n is a or c or g or t.
MFILLYYKNVNGGRMAVISVRIPDELKAKMKELDINWSEEIRKFIEERVLRAEKQKKLDEIHRLLSGGTPADEGTARKYVRDDRDSN

SEQ ID NO: 1709 - protein, 65 aa, Thermococcus kodakaraensis KOD1
  misc_feature (321437)..(321437): n is a or c or g or t.
  misc_feature (527833)..(527833): n is a or c or g or t.
  misc_feature (527901)..(527901): n is a or c or g or t.
  misc_feature (527978)..(527978): n is a or c or g or t.
  misc_feature (960838)..(960839): n is a or c or g or t.
  misc_feature (960860)..(960861): n is a or c or g or t.
  misc_feature (960872)..(960873): n is a or c or g or t.
  misc_feature (960879)..(960879): n is a or c or g or t.
  misc_feature (960890)..(960890): n is a or c or g or t.
  misc_feature (1250239)..(1250239): n is a or c or g or t.
  misc_feature (1302432)..(1302434): n is a or c or g or t.
  misc_feature (1302471)..(1302471): n is a or c or g or t.
  misc_feature (1302488)..(1302488): n is a or c or g or t.
  misc_feature (1674836)..(1674836): n is a or c or g or t.
MEAGVEKLILRELREIKEELKILNSKIDNFTGYFDLDEEEIEELYRELEDAKKHGKRLEDVLNEL

SEQ ID NO: 1710 - protein, 78 aa, Thermococcus kodakaraensis KOD1
  misc_feature (321437)..(321437): n is a or c or g or t.
  misc_feature (527833)..(527833): n is a or c or g or t.
  misc_feature (527901)..(527901): n is a or c or g or t.
  misc_feature (527978)..(527978): n is a or c or g or t.
  misc_feature (960838)..(960839): n is a or c or g or t.
  misc_feature (960860)..(960861): n is a or c or g or t.
  misc_feature (960872)..(960873): n is a or c or g or t.
  misc_feature (960879)..(960879): n is a or c or g or t.
  misc_feature (960890)..(960890): n is a or c or g or t.
  misc_feature (1250239)..(1250239): n is a or c or g or t.
  misc_feature (1302432)..(1302434): n is a or c or g or t.
  misc_feature (1302471)..(1302471): n is a or c or g or t.
  misc_feature (1302488)..(1302488): n is a or c or g or t.
  misc_feature (1674836)..(1674836): n is a or c or g or t.
VMLMIVPLNSLKPGERGIVVNLQGGPGFRNRLLGMGITPGAVVQVIEVYNPGPLIISVSGTRFAIGRGMASRIIVRKL

SEQ ID NO: 1711 - protein, 416 aa, Thermococcus kodakaraensis KOD1
  misc_feature (321437)..(321437): n is a or c or g or t.
  misc_feature (527833)..(527833): n is a or c or g or t.
  misc_feature (527901)..(527901): n is a or c or g or t.
  misc_feature (527978)..(527978): n is a or c or g or t.
  misc_feature (960838)..(960839): n is a or c or g or t.
  misc_feature (960860)..(960861): n is a or c or g or t.
  misc_feature (960872)..(960873): n is a or c or g or t.
  misc_feature (960879)..(960879): n is a or c or g or t.
  misc_feature (960890)..(960890): n is a or c or g or t.
  misc_feature (1250239)..(1250239): n is a or c or g or t.
  misc_feature (1302432)..(1302434): n is a or c or g or t.
  misc_feature (1302471)..(1302471): n is a or c or g or t.
  misc_feature (1302488)..(1302488): n is a or c or g or t.
  misc_feature (1674836)..(1674836): n is a or c or g or t.
VMLMKAVILAGGFGTRLRPISSTRPKPMVPVLGKPNLQYLLENIEKIPEIDEVILSVHYMRGEIREFIDEKMADYPKDIRFVNDPMPLETGGALKNVEEYVSDDFLVIYGDVFTNFNFRELIEAHRNNDGLITVAVTKVYDPERFGVVETDENGKVTHFEEKPHRPKTNLVDAGIYVVNKKVLEEIPKGKEVYFEREVLPKFVARGEVYAYRMPRDAYWVDLGTPDDLFYAHQIAMDEIAKDNGYITIKEGAEVPDDVEIQGPVYIDEGAKIGHGVKIKAYTYIGPNTIVEDKAYLKRSILIGSDIIKERAELKDTILGEGVVVGKNVIIKENAVVGDYARIADDLVIYGAKVLPWKKVEEYEAYIKVKLDPTKVRPGQYPDHCPLGLPECIYKKFKAIAGEKPPCDECIENQWLF

SEQ ID NO: 1712 - protein, 248 aa, Thermococcus kodakaraensis KOD1
  misc_feature (321437)..(321437): n is a or c or g or t.
  misc_feature (527833)..(527833): n is a or c or g or t.
  misc_feature (527901)..(527901): n is a or c or g or t.
  misc_feature (527978)..(527978): n is a or c or g or t.
  misc_feature (960838)..(960839): n is a or c or g or t.
  misc_feature (960860)..(960861): n is a or c or g or t.
  misc_feature (960872)..(960873): n is a or c or g or t.
  misc_feature (960879)..(960879): n is a or c or g or t.
  misc_feature (960890)..(960890): n is a or c or g or t.
  misc_feature (1250239)..(1250239): n is a or c or g or t.
  misc_feature (1302432)..(1302434): n is a or c or g or t.
  misc_feature (1302471)..(1302471): n is a or c or g or t.
  misc_feature (1302488)..(1302488): n is a or c or g or t.
  misc_feature (1674836)..(1674836): n is a or c or g or t.
VTLMGHLISIASGKGGTGKTTTTSNLSVALGKMGYKVLAVDADLTMANLSLVMGIDDAETTIHDVLAGEADIKDAIYSTSYENVDLIPAAVDWEHVLKADPRRLPSTIKPLKSEYDFVLIDCPAGLQMDAMNAMMSGEEVILVTNPEISCITDTMKVGIVLRKAGLAVLGFVLNRYGRSENDIPPDAAEEVMEVPLLVVIPEDPKVREATLEGVPVVEYAPDSEGAKAFMALAEEVSRIAGFKARVMG

SEQ ID NO: 1713 - protein, 234 aa, Thermococcus kodakaraensis KOD1
  misc_feature (321437)..(321437): n is a or c or g or t.
  misc_feature (527833)..(527833): n is a or c or g or t.
  misc_feature (527901)..(527901): n is a or c or g or t.
  misc_feature (527978)..(527978): n is a or c or g or t.
  misc_feature (960838)..(960839): n is a or c or g or t.
  misc_feature (960860)..(960861): n is a or c or g or t.
  misc_feature (960872)..(960873): n is a or c or g or t.
  misc_feature (960879)..(960879): n is a or c or g or t.
  misc_feature (960890)..(960890): n is a or c or g or t.
  misc_feature (1250239)..(1250239): n is a or c or g or t.
  misc_feature (1302432)..(1302434): n is a or c or g or t.
  misc_feature (1302471)..(1302471): n is a or c or g or t.
  misc_feature (1302488)..(1302488): n is a or c or g or t.
  misc_feature (1674836)..(1674836): n is a or c or g or t.
MPREKVVKIWDEREVVYSPKRWRYLWEKRENALKIMERLKDFDPVLYGSVARGDVRKDSDIDIFIPIRVPSYLIELALEGLVRRRKIVMATPWHLIKGVIEIDEETSVTFPLLEPTDRELEFYRWGGAIDIWGVKTKERVPGVNKKLILILPTEKGHIEREVMGREPEVAKILGVSVDIVTERVHVLTRRDSIGRTGIYLNEEVPDWMSFEEALKIIADRDPNVRRKVRERGDI

SEQ ID NO: 1714 - protein, 256 aa, Thermococcus kodakaraensis KOD1
  misc_feature (321437)..(321437): n is a or c or g or t.
  misc_feature (527833)..(527833): n is a or c or g or t.
  misc_feature (527901)..(527901): n is a or c or g or t.
  misc_feature (527978)..(527978): n is a or c or g or t.
  misc_feature (960838)..(960839): n is a or c or g or t.
  misc_feature (960860)..(960861): n is a or c or g or t.
  misc_feature (960872)..(960873): n is a or c or g or t.
  misc_feature (960879)..(960879): n is a or c or g or t.
  misc_feature (960890)..(960890): n is a or c or g or t.
  misc_feature (1250239)..(1250239): n is a or c or g or t.
  misc_feature (1302432)..(1302434): n is a or c or g or t.
  misc_feature (1302471)..(1302471): n is a or c or g or t.
  misc_feature (1302488)..(1302488): n is a or c or g or t.
  misc_feature (1674836)..(1674836): n is a or c or g or t.
MLNTSARLRGNDVMSAKEEALKVIESVLKSGRTALVEYEAKQVLKAYSLPVPNEKLAKTLDEALEYAEEIGYPVAMKLMSPQILHKSDAKVVILNIKSPEELKQKWEEIHENARKYRPDAEILGVLIAPMLRPGREIIIGVTEDPQFGHAIMFGLGGIFVEVLKDVTFRIIPITEKDARKMIAEIKGYPILAGARGEEPADIDAIVDMLLKVSQLVDELRDYIKEMDLNPVFVYEKGKGAVVVDARIIAKAPEKKE

SEQ ID NO: 1715 - protein, 276 aa, Thermococcus kodakaraensis KOD1
  misc_feature (321437)..(321437): n is a or c or g or t.
  misc_feature (527833)..(527833): n is a or c or g or t.
  misc_feature (527901)..(527901): n is a or c or g or t.
  misc_feature (527978)..(527978): n is a or c or g or t.
  misc_feature (960838)..(960839): n is a or c or g or t.
  misc_feature (960860)..(960861): n is a or c or g or t.
  misc_feature (960872)..(960873): n is a or c or g or t.
  misc_feature (960879)..(960879): n is a or c or g or t.
  misc_feature (960890)..(960890): n is a or c or g or t.
  misc_feature (1250239)..(1250239): n is a or c or g or t.
  misc_feature (1302432)..(1302434): n is a or c or g or t.
  misc_feature (1302471)..(1302471): n is a or c or g or t.
  misc_feature (1302488)..(1302488): n is a or c or g or t.
  misc_feature (1674836)..(1674836): n is a or c or g or t.
MRLIVRGKHIRDSLAAELRKEGIKFEVRERLGYDGFIGYMLTGTLDEIEKAVESIEGVDRDALREGFMSFKESVTHILEHLKVGEDAEKLLMEGAWVGDILDQLHRAGVLDYDGKTVKLREGVDPSSIRFEFKFPFNIVHNPEEAEKVAKQFVFTDLLPEYEFEFLELDIARINKIGSIAGRYFPEDVLLKAYFALISRGILAEEILRVLKDGKIPEEELIKSFMRAAPMAIPTPKGTLVINYSKEAIEETLKLLKKLGYIEIKGGKVRKIREMGE

SEQ ID NO: 1716 - protein, 56 aa, Thermococcus kodakaraensis KOD1
  misc_feature (321437)..(321437): n is a or c or g or t.
  misc_feature (527833)..(527833): n is a or c or g or t.
  misc_feature (527901)..(527901): n is a or c or g or t.
  misc_feature (527978)..(527978): n is a or c or g or t.
  misc_feature (960838)..(960839): n is a or c or g or t.
  misc_feature (960860)..(960861): n is a or c or g or t.
  misc_feature (960872)..(960873): n is a or c or g or t.
  misc_feature (960879)..(960879): n is a or c or g or t.
  misc_feature (960890)..(960890): n is a or c or g or t.
  misc_feature (1250239)..(1250239): n is a or c or g or t.
  misc_feature (1302432)..(1302434): n is a or c or g or t.
  misc_feature (1302471)..(1302471): n is a or c or g or t.
  misc_feature (1302488)..(1302488): n is a or c or g or t.
  misc_feature (1674836)..(1674836): n is a or c or g or t.
VKVGKAYVSVGHLIDLPSAVEVVKTLNKNGYPLPLRIADRLSRGHTSWSGGVNDEH

SEQ ID NO: 1717 - protein, 393 aa, Thermococcus kodakaraensis KOD1
  misc_feature (321437)..(321437): n is a or c or g or t.
  misc_feature (527833)..(527833): n is a or c or g or t.
  misc_feature (527901)..(527901): n is a or c or g or t.
  misc_feature (527978)..(527978): n is a or c or g or t.
  misc_feature (960838)..(960839): n is a or c or g or t.
  misc_feature (960860)..(960861): n is a or c or g or t.
  misc_feature (960872)..(960873): n is a or c or g or t.
  misc_feature (960879)..(960879): n is a or c or g or t.
  misc_feature (960890)..(960890): n is a or c or g or t.
  misc_feature (1250239)..(1250239): n is a or c or g or t.
  misc_feature (1302432)..(1302434): n is a or c or g or t.
  misc_feature (1302471)..(1302471): n is a or c or g or t.
  misc_feature (1302488)..(1302488): n is a or c or g or t.
  misc_feature (1674836)..(1674836): n is a or c or g or t.
MIVEKASEVLERYQLCDHCLGRLFAKLGKGTNEERGKAIRFVLNMERAKDGLPPVEEPKECELCNNVFDRIPELVENMKEAAKDVEFETFLVGSRFPDEVKEKEKAIWDEFGIETAEPINREFNRELGKAFGRATGKDTSKSPDVVFIVEPYSGKIELQINPLYIYGRYRKLLRGIPQTPHPDFEESVASIICRPFSRATGGKCVFKGAGREDVDVRMLGNGRPFILEIKRPKRRNINLEEIAREINASGKVEVLNLRFTTPDEAERVLSTPHRKEYLALVLVKEGVTPEEAEEVAKKLTGLEIHQRTPWRVRKARADKVRVRRVHYAEARWIDDKHFELRLITDGGLYIKELISGDKGRTKPSVSDLLGKPAWCERLDVLNVLDEERSEDSS

SEQ ID NO: 1718 - protein, 118 aa, Thermococcus kodakaraensis KOD1
  misc_feature (114)..(114): The 'Xaa' at location 114 stands for Lys, Asn, Arg, Ser, Thr, Ile , or Met.
  misc_feature (115)..(115): The 'Xaa' at location 115 stands for Ile, Val, Leu, or Phe.
  misc_feature (321437)..(321437): n is a or c or g or t.
  misc_feature (527833)..(527833): n is a or c or g or t.
  misc_feature (527901)..(527901): n is a or c or g or t.
  misc_feature (527978)..(527978): n is a or c or g or t.
  misc_feature (960838)..(960839): n is a or c or g or t.
  misc_feature (960860)..(960861): n is a or c or g or t.
  misc_feature (960872)..(960873): n is a or c or g or t.
  misc_feature (960879)..(960879): n is a or c or g or t.
  misc_feature (960890)..(960890): n is a or c or g or t.
  misc_feature (1250239)..(1250239): n is a or c or g or t.
  misc_feature (1302432)..(1302434): n is a or c or g or t.
  misc_feature (1302471)..(1302471): n is a or c or g or t.
  misc_feature (1302488)..(1302488): n is a or c or g or t.
  misc_feature (1674836)..(1674836): n is a or c or g or t.
MTMIGRKKLEEHYITIAEAKELLERRHAEGLAENPEEPMFYEARVSLEHAERFAKLKPEQARELKEKLMGLFDWINERIAAKLVDILPEDYLDIRVIFAKEEYMPTPEEAEEIXXKVS

SEQ ID NO: 1719 - protein, 240 aa, Thermococcus kodakaraensis KOD1
  misc_feature (321437)..(321437): n is a or c or g or t.
  misc_feature (527833)..(527833): n is a or c or g or t.
  misc_feature (527901)..(527901): n is a or c or g or t.
  misc_feature (527978)..(527978): n is a or c or g or t.
  misc_feature (960838)..(960839): n is a or c or g or t.
  misc_feature (960860)..(960861): n is a or c or g or t.
  misc_feature (960872)..(960873): n is a or c or g or t.
  misc_feature (960879)..(960879): n is a or c or g or t.
  misc_feature (960890)..(960890): n is a or c or g or t.
  misc_feature (1250239)..(1250239): n is a or c or g or t.
  misc_feature (1302432)..(1302434): n is a or c or g or t.
  misc_feature (1302471)..(1302471): n is a or c or g or t.
  misc_feature (1302488)..(1302488): n is a or c or g or t.
  misc_feature (1674836)..(1674836): n is a or c or g or t.
VGEKDTVLEIGPGLGVLTDPLSKRAGKVYAIEKDCRIVEILRREYNWPNVEIIEGDALKVEWPEFNKMVSNLPYQISSPVTFKLLSREFERAVLIFQLEFAERMVAKPGDKNYSRLSLMVRAKARAELVERIGKGAFWPRPKVDSAVVVLEPKPPEERIDLNENLVKALFQHRRSTVSAALKKSAHMLGLSKDKARELRQVFSRVPHSERRVFQLSPEDVLEIEEFLKKEGVIESYPASP

SEQ ID NO: 1720 - protein, 231 aa, Thermococcus kodakaraensis KOD1
  misc_feature (321437)..(321437): n is a or c or g or t.
  misc_feature (527833)..(527833): n is a or c or g or t.
  misc_feature (527901)..(527901): n is a or c or g or t.
  misc_feature (527978)..(527978): n is a or c or g or t.
  misc_feature (960838)..(960839): n is a or c or g or t.
  misc_feature (960860)..(960861): n is a or c or g or t.
  misc_feature (960872)..(960873): n is a or c or g or t.
  misc_feature (960879)..(960879): n is a or c or g or t.
  misc_feature (960890)..(960890): n is a or c or g or t.
  misc_feature (1250239)..(1250239): n is a or c or g or t.
  misc_feature (1302432)..(1302434): n is a or c or g or t.
  misc_feature (1302471)..(1302471): n is a or c or g or t.
  misc_feature (1302488)..(1302488): n is a or c or g or t.
  misc_feature (1674836)..(1674836): n is a or c or g or t.
MRNILPFLTRIPVKGDFEKARNELWAFPLVALVSSALPTLILYLGLPLSNLLAVLALYWTIGLLHLDGLADWADGIMAKGDRERKIEVMKDVNTGIAGLFAVVIVLLLQVYSLQLLPFYALFLAELNSKYAMLLALATKRPLGKGLGAYFMEGMNGRQLALGTLLYVLLGLSVVLFEPRALAGILGLLFGVHIIRISLKNFDGLNGDCLGATAEITRAGTLVVMALVWWYL

SEQ ID NO: 1721 - protein, 312 aa, Thermococcus kodakaraensis KOD1
  misc_feature (321437)..(321437): n is a or c or g or t.
  misc_feature (527833)..(527833): n is a or c or g or t.
  misc_feature (527901)..(527901): n is a or c or g or t.
  misc_feature (527978)..(527978): n is a or c or g or t.
  misc_feature (960838)..(960839): n is a or c or g or t.
  misc_feature (960860)..(960861): n is a or c or g or t.
  misc_feature (960872)..(960873): n is a or c or g or t.
  misc_feature (960879)..(960879): n is a or c or g or t.
  misc_feature (960890)..(960890): n is a or c or g or t.
  misc_feature (1250239)..(1250239): n is a or c or g or t.
  misc_feature (1302432)..(1302434): n is a or c or g or t.
  misc_feature (1302471)..(1302471): n is a or c or g or t.
  misc_feature (1302488)..(1302488): n is a or c or g or t.
  misc_feature (1674836)..(1674836): n is a or c or g or t.
MVEIARLGVFPIRKVFSREEEFSNWLVENIKILEEKIGVELEDIEREYQIGSYFADIVARDANSEGMVIIENQFEKTNHDHLGKILTYASGLDAKIIVWIAEKFSEEHKQALNWLNENTGQDIGFFGIEVKAVKIGDSPYAVDFDIVVMPNQWRKISKSAIERLGPREETYLDIWRRVLERYGKNLRPRPRYRFVFGSGVSDVPYEWRIWEYKFSIGVYIGKPSPEENERIQECLQERIDEIARAMNVPIEEIKWEEPYGTTRGSKRLCIYYPLTKSLFEMSEKEREALAERMASEMKKLEKATKKILHRCR

SEQ ID NO: 1722 - protein, 196 aa, Thermococcus kodakaraensis KOD1
  misc_feature (321437)..(321437): n is a or c or g or t.
  misc_feature (527833)..(527833): n is a or c or g or t.
  misc_feature (527901)..(527901): n is a or c or g or t.
  misc_feature (527978)..(527978): n is a or c or g or t.
  misc_feature (960838)..(960839): n is a or c or g or t.
  misc_feature (960860)..(960861): n is a or c or g or t.
  misc_feature (960872)..(960873): n is a or c or g or t.
  misc_feature (960879)..(960879): n is a or c or g or t.
  misc_feature (960890)..(960890): n is a or c or g or t.
  misc_feature (1250239)..(1250239): n is a or c or g or t.
  misc_feature (1302432)..(1302434): n is a or c or g or t.
  misc_feature (1302471)..(1302471): n is a or c or g or t.
  misc_feature (1302488)..(1302488): n is a or c or g or t.
  misc_feature (1674836)..(1674836): n is a or c or g or t.
MRIELPAPRLKGEMSVEEAINLRRSVRKYKDAPLTLEQVSQLLWAAYGMNAWGKRTSPSAGACYPFEVYVAVSKVKGLNPGLYHYDGEAHALELVREGDINKPLAKACLGQRHVETAPINIIIVAHYERTTRRYGERGYRYVHIDAGHMGQNIYLQATALGLGTVAVGAFIDEEVKKLMGVPGEPLYIFPVGVPQV

SEQ ID NO: 1723 - protein, 384 aa, Thermococcus kodakaraensis KOD1
  misc_feature (321437)..(321437): n is a or c or g or t.
  misc_feature (527833)..(527833): n is a or c or g or t.
  misc_feature (527901)..(527901): n is a or c or g or t.
  misc_feature (527978)..(527978): n is a or c or g or t.
  misc_feature (960838)..(960839): n is a or c or g or t.
  misc_feature (960860)..(960861): n is a or c or g or t.
  misc_feature (960872)..(960873): n is a or c or g or t.
  misc_feature (960879)..(960879): n is a or c or g or t.
  misc_feature (960890)..(960890): n is a or c or g or t.
  misc_feature (1250239)..(1250239): n is a or c or g or t.
  misc_feature (1302432)..(1302434): n is a or c or g or t.
  misc_feature (1302471)..(1302471): n is a or c or g or t.
  misc_feature (1302488)..(1302488): n is a or c or g or t.
  misc_feature (1674836)..(1674836): n is a or c or g or t.
VVVNLEFSNSLNTPRRNSVGAKIMEIVIIGNGPGGVELAKELSGEHEVLIFEREEVPFYSKPMLSHYIAGLIEKEKLFIYPLDWYERKGINLKLGEEAKLIDRVRKVLVTDKGEYPYDILVIATGARAREPTVDGKEHLLTLRSIEDAEGIKALLEEHGEAVIIGGGFIGLELAGNLAKAGYGVKLIHRRDTFLGLDEELSSLIREKLEESGVEFHLGAELLKADENGLLTTRGYIEGKVKICAIGITPNVEIARRSGIHTGRGILIDDHFRTSAKDVYAIGDCAEYSGIICGTAKAAAGHAKVLANLLRGKEDRYPFELRSSVFKFGDLPIAIIGKTRGEGEWLDEHTKAFFQDGKLVGAVVIGDIRKAFSIEKELKKELYGA

SEQ ID NO: 1724 - protein, 267 aa, Thermococcus kodakaraensis KOD1
  misc_feature (321437)..(321437): n is a or c or g or t.
  misc_feature (527833)..(527833): n is a or c or g or t.
  misc_feature (527901)..(527901): n is a or c or g or t.
  misc_feature (527978)..(527978): n is a or c or g or t.
  misc_feature (960838)..(960839): n is a or c or g or t.
  misc_feature (960860)..(960861): n is a or c or g or t.
  misc_feature (960872)..(960873): n is a or c or g or t.
  misc_feature (960879)..(960879): n is a or c or g or t.
  misc_feature (960890)..(960890): n is a or c or g or t.
  misc_feature (1250239)..(1250239): n is a or c or g or t.
  misc_feature (1302432)..(1302434): n is a or c or g or t.
  misc_feature (1302471)..(1302471): n is a or c or g or t.
  misc_feature (1302488)..(1302488): n is a or c or g or t.
  misc_feature (1674836)..(1674836): n is a or c or g or t.
MGGGMDRARILLIAIVIDLIAIGVVASAIYQENSKKTSEEVSIDGTPIEGVLKLYTTPTGPIKSINGTLIGNVTAYGRVLHFDGNGYVDLSNAIGEISDMKVGAISLVFRYEETDQNVLPILYFGDREGKSLFIIEIGHNGENNRRLYVTWIPEGDKPALCFDSGFNLKPGRWYHLVVVVSEDGNTAYLNGREMTWRHYNFGNESMRLFCVDIPGKELFTLGYGKTADSVTPEFLYFHGDIADLRIYPWPLSAEEVSSLLEEIRSRN

SEQ ID NO: 1725 - protein, 570 aa, Thermococcus kodakaraensis KOD1
  misc_feature (321437)..(321437): n is a or c or g or t.
  misc_feature (527833)..(527833): n is a or c or g or t.
  misc_feature (527901)..(527901): n is a or c or g or t.
  misc_feature (527978)..(527978): n is a or c or g or t.
  misc_feature (960838)..(960839): n is a or c or g or t.
  misc_feature (960860)..(960861): n is a or c or g or t.
  misc_feature (960872)..(960873): n is a or c or g or t.
  misc_feature (960879)..(960879): n is a or c or g or t.
  misc_feature (960890)..(960890): n is a or c or g or t.
  misc_feature (1250239)..(1250239): n is a or c or g or t.
  misc_feature (1302432)..(1302434): n is a or c or g or t.
  misc_feature (1302471)..(1302471): n is a or c or g or t.
  misc_feature (1302488)..(1302488): n is a or c or g or t.
  misc_feature (1674836)..(1674836): n is a or c or g or t.
MSEFKEDVSIVLGGAAGQGIQTVEEILTHALKKSGYHVYANKEYMSRVRGGINTTEIRVSSKRVRAFVKRIDILVPFKQGVLSWVRDRLGENTVVLGEKENVEEEFLDKVNLVEVPLTKMVMEVGSQLYLNTTAAGLIVGFFHGDFGAVEEYIRKRFGSKGENVVQKNIEAARKGYELGVKLCEEGTIKIEVERDEKVKDEVLLTGTEAVGIGAFAGGMDFLSFYPMSPSTGVSTFAAQHAEEFGIIVEQVEDEISAINMALGAWYAGARAMVSTSGGGFALMSEAISLAGMAENPVVVHLAQRPGPATGLPTRTMQGDLNLVLYSGHGDFPRIILAPGSLEEAFYLTAEAFNLADKYQVPVIILTDQYFVDTYYNLPAPDMEKVKFERYIVEAKPGYRRYELTEDGISPRAVPGYGEEVVIANGNEHDEWGDITEDAELTIKMQEKRAIKKLETIKKNAPLPKLIGSENAKYLVIAWGSTLHVVEEALEKLGRDDVALLHFSWVYPLKPKVREFFEGKVLIDVENNITGQFAELLRKELGIEVHHKILKYDGRPFSVEEVLEGLKGVIE

SEQ ID NO: 1726 - protein, 66 aa, Thermococcus kodakaraensis KOD1
  misc_feature (321437)..(321437): n is a or c or g or t.
  misc_feature (527833)..(527833): n is a or c or g or t.
  misc_feature (527901)..(527901): n is a or c or g or t.
  misc_feature (527978)..(527978): n is a or c or g or t.
  misc_feature (960838)..(960839): n is a or c or g or t.
  misc_feature (960860)..(960861): n is a or c or g or t.
  misc_feature (960872)..(960873): n is a or c or g or t.
  misc_feature (960879)..(960879): n is a or c or g or t.
  misc_feature (960890)..(960890): n is a or c or g or t.
  misc_feature (1250239)..(1250239): n is a or c or g or t.
  misc_feature (1302432)..(1302434): n is a or c or g or t.
  misc_feature (1302471)..(1302471): n is a or c or g or t.
  misc_feature (1302488)..(1302488): n is a or c or g or t.
  misc_feature (1674836)..(1674836): n is a or c or g or t.
MPMDRKLDEFIGDATPKKVSKEKPVRRKKRLKPTSLDSFLPEEHINYFRDLRIGSKKIRNAKIEEL

SEQ ID NO: 1727 - protein, 120 aa, Thermococcus kodakaraensis KOD1
  misc_feature (321437)..(321437): n is a or c or g or t.
  misc_feature (527833)..(527833): n is a or c or g or t.
  misc_feature (527901)..(527901): n is a or c or g or t.
  misc_feature (527978)..(527978): n is a or c or g or t.
  misc_feature (960838)..(960839): n is a or c or g or t.
  misc_feature (960860)..(960861): n is a or c or g or t.
  misc_feature (960872)..(960873): n is a or c or g or t.
  misc_feature (960879)..(960879): n is a or c or g or t.
  misc_feature (960890)..(960890): n is a or c or g or t.
  misc_feature (1250239)..(1250239): n is a or c or g or t.
  misc_feature (1302432)..(1302434): n is a or c or g or t.
  misc_feature (1302471)..(1302471): n is a or c or g or t.
  misc_feature (1302488)..(1302488): n is a or c or g or t.
  misc_feature (1674836)..(1674836): n is a or c or g or t.
VMLMAGKKKNDRHVEGDEVIRVPLPDRSKGQLFGVIEQALGAGWMDVRCEDGKVRRCRIPGKLKRRMWMRVGDVVIVQPWPVQSDERGDIVYRYTRTQVDWLLRKGKITQDFLSGGELLF

SEQ ID NO: 1728 - protein, 255 aa, Thermococcus kodakaraensis KOD1
  misc_feature (321437)..(321437): n is a or c or g or t.
  misc_feature (527833)..(527833): n is a or c or g or t.
  misc_feature (527901)..(527901): n is a or c or g or t.
  misc_feature (527978)..(527978): n is a or c or g or t.
  misc_feature (960838)..(960839): n is a or c or g or t.
  misc_feature (960860)..(960861): n is a or c or g or t.
  misc_feature (960872)..(960873): n is a or c or g or t.
  misc_feature (960879)..(960879): n is a or c or g or t.
  misc_feature (960890)..(960890): n is a or c or g or t.
  misc_feature (1250239)..(1250239): n is a or c or g or t.
  misc_feature (1302432)..(1302434): n is a or c or g or t.
  misc_feature (1302471)..(1302471): n is a or c or g or t.
  misc_feature (1302488)..(1302488): n is a or c or g or t.
  misc_feature (1674836)..(1674836): n is a or c or g or t.
MLRIQRGSSASSLRGEIMDEFERLLKKYERVDKDGRFEREEDEEEITFTALGEQEEFVKIPKERIAVLIGKKGQTKKEIERKTKTKIEVDSETGEVFITATEETDDPLAVWKARDVVMAIGRGFSPERAFRLFNEGETLEVVNLTDIVVGNEKNALPRVRGRIIGRKGRTREIIEEMSGADISVYGKTVAIIGNPIQVEVAKTAVEKLARGSPHGVVYRYLERRKKDLELEATTYYEALEGKLPEDLDEFEEEEE

SEQ ID NO: 1729 - protein, 385 aa, Thermococcus kodakaraensis KOD1
  misc_feature (321437)..(321437): n is a or c or g or t.
  misc_feature (527833)..(527833): n is a or c or g or t.
  misc_feature (527901)..(527901): n is a or c or g or t.
  misc_feature (527978)..(527978): n is a or c or g or t.
  misc_feature (960838)..(960839): n is a or c or g or t.
  misc_feature (960860)..(960861): n is a or c or g or t.
  misc_feature (960872)..(960873): n is a or c or g or t.
  misc_feature (960879)..(960879): n is a or c or g or t.
  misc_feature (960890)..(960890): n is a or c or g or t.
  misc_feature (1250239)..(1250239): n is a or c or g or t.
  misc_feature (1302432)..(1302434): n is a or c or g or t.
  misc_feature (1302471)..(1302471): n is a or c or g or t.
  misc_feature (1302488)..(1302488): n is a or c or g or t.
  misc_feature (1674836)..(1674836): n is a or c or g or t.
MPKRKIQRERPKEKFSYDPRKVLKMLDEHARRILEDIKAGKNPHFDIPMRGLSNVYFDEKSRLIKMGDKLSRRYFLNVAHARKFMQTLLIMAYVKRLVSEGKHASLREAYYANKHTIPGTRENTFEDQSESDPIIEDLERMFGVLREEMHITADRRGYIYGDIVIRDGEDEFNASRLGSGGWAVPGTVEHIQFPEINVDYALVVETAAMADRLIEEKFPKRENALIIATQGQASRGVRRLIHRLHYEEGLPIIVFTDGDPYGWYIYSTIKQGSINLAYLSDKLATPESKFVGMTMDDIKKYGLENVTEKLKGIPPNKKGGPTGDYKRILEEMNYPWFQNKEWQRQLQLALKWGVRIEQQALANKSLEFVAKEYLPEKINNGDLLP

SEQ ID NO: 1730 - protein, 139 aa, Thermococcus kodakaraensis KOD1
  misc_feature (321437)..(321437): n is a or c or g or t.
  misc_feature (527833)..(527833): n is a or c or g or t.
  misc_feature (527901)..(527901): n is a or c or g or t.
  misc_feature (527978)..(527978): n is a or c or g or t.
  misc_feature (960838)..(960839): n is a or c or g or t.
  misc_feature (960860)..(960861): n is a or c or g or t.
  misc_feature (960872)..(960873): n is a or c or g or t.
  misc_feature (960879)..(960879): n is a or c or g or t.
  misc_feature (960890)..(960890): n is a or c or g or t.
  misc_feature (1250239)..(1250239): n is a or c or g or t.
  misc_feature (1302432)..(1302434): n is a or c or g or t.
  misc_feature (1302471)..(1302471): n is a or c or g or t.
  misc_feature (1302488)..(1302488): n is a or c or g or t.
  misc_feature (1674836)..(1674836): n is a or c or g or t.
MKVRVKAKTYSELIRKLDEVLNEDVSEVYVNLRPTKEVVVKILERSPNVRKITCPPSLYPKVSQKVIMALNQLGVELLPESYPRGRPKKYDEKTIKQVVELARKGVPMKEISRKLGIPLRTVYYLANLYTTSYSSFRGE

SEQ ID NO: 1731 - protein, 703 aa, Thermococcus kodakaraensis KOD1
  misc_feature (321437)..(321437): n is a or c or g or t.
  misc_feature (527833)..(527833): n is a or c or g or t.
  misc_feature (527901)..(527901): n is a or c or g or t.
  misc_feature (527978)..(527978): n is a or c or g or t.
  misc_feature (960838)..(960839): n is a or c or g or t.
  misc_feature (960860)..(960861): n is a or c or g or t.
  misc_feature (960872)..(960873): n is a or c or g or t.
  misc_feature (960879)..(960879): n is a or c or g or t.
  misc_feature (960890)..(960890): n is a or c or g or t.
  misc_feature (1250239)..(1250239): n is a or c or g or t.
  misc_feature (1302432)..(1302434): n is a or c or g or t.
  misc_feature (1302471)..(1302471): n is a or c or g or t.
  misc_feature (1302488)..(1302488): n is a or c or g or t.
  misc_feature (1674836)..(1674836): n is a or c or g or t.
VVHVGRFEISENALEKIAESLREEYEGSNVDYVIEDMRISENGEYLSVLIRDDYDSRFLHIFDTKGNPLLGWKSGVGIPCQEDVVVFPGVENVAVFMKCGTGEIALYPFQDENPKEHALRVTFSRLPIYVSLTNMERVVIFGDMRLDFSAPADLETVFIPRLQGGYAFFHAIHDTDDEIYILHTFKEPGMKNPTLRIGRINYPPHPYYSPIEFWDGVETISAHSPAPPTKGAIGDIVLRDNEPIAVLGTKLGKELYILTSKKARIIPLPGELVFTKFTEKGLFLLIGQFRGYLYGGFVTYEDLLQKGSLKLDDIVDRTVFGRYNPEAFDPKFSGISRSGDVLVLGKSSGKVSASGRFYYYVRPDSNYLYSYVSTQAAPGEGDITYDQFTQLEEVLRRFGGVILYGPPGTGKTKLALDLSRDADKVEVVTFHQSYSYEDFVEGFRPVEKEGKLLYVVEDGILKRLAVEAIFRGLHPDEGEADYKKKKEAVLEYLQTGKGEFKPRGKFYLIIDEINRGNISRILGEVITLLDPDKRLGMEYETKITLPYSREPFALPPNLYIIGTMNSTDRSIAFLDMALRRRFAFLEILPRPEELGDIEVGGVNLQHLLSTLNRVIEEERGKDYTIGHGYFREVIKAKPEERAKALKDVFYYKILPLLQEYFYGNWEAIRRSLPGFGFIDEKGRIIEMDDDEFIEALRKLVTEK

SEQ ID NO: 1732 - protein, 206 aa, Thermococcus kodakaraensis KOD1
  misc_feature (321437)..(321437): n is a or c or g or t.
  misc_feature (527833)..(527833): n is a or c or g or t.
  misc_feature (527901)..(527901): n is a or c or g or t.
  misc_feature (527978)..(527978): n is a or c or g or t.
  misc_feature (960838)..(960839): n is a or c or g or t.
  misc_feature (960860)..(960861): n is a or c or g or t.
  misc_feature (960872)..(960873): n is a or c or g or t.
  misc_feature (960879)..(960879): n is a or c or g or t.
  misc_feature (960890)..(960890): n is a or c or g or t.
  misc_feature (1250239)..(1250239): n is a or c or g or t.
  misc_feature (1302432)..(1302434): n is a or c or g or t.
  misc_feature (1302471)..(1302471): n is a or c or g or t.
  misc_feature (1302488)..(1302488): n is a or c or g or t.
  misc_feature (1674836)..(1674836): n is a or c or g or t.
MSLEHYFHRYGRATFTLFLINVAVYVVEAVLSGGNFLSIRGSVLALLGQWNYAVLNYGYWWQLFTAMFVHVNIIHIFFNMYFLLTMGRQLERVLGPRRVVMTYIVSGLVGNVLTLFLKPPMTVSAGASGALFGIVGALITISGVVGGNMQAAMMNAFFLFLINSVLPGVNAYAHLGGLLAGIAIGYYYGKVIRRRLTWQYAYGDYW

SEQ ID NO: 1733 - protein, 117 aa, Thermococcus kodakaraensis KOD1
  misc_feature (321437)..(321437): n is a or c or g or t.
  misc_feature (527833)..(527833): n is a or c or g or t.
  misc_feature (527901)..(527901): n is a or c or g or t.
  misc_feature (527978)..(527978): n is a or c or g or t.
  misc_feature (960838)..(960839): n is a or c or g or t.
  misc_feature (960860)..(960861): n is a or c or g or t.
  misc_feature (960872)..(960873): n is a or c or g or t.
  misc_feature (960879)..(960879): n is a or c or g or t.
  misc_feature (960890)..(960890): n is a or c or g or t.
  misc_feature (1250239)..(1250239): n is a or c or g or t.
  misc_feature (1302432)..(1302434): n is a or c or g or t.
  misc_feature (1302471)..(1302471): n is a or c or g or t.
  misc_feature (1302488)..(1302488): n is a or c or g or t.
  misc_feature (1674836)..(1674836): n is a or c or g or t.
MGKGFNRPVLTFAVMGMEERWGKIAEYIVEAVLIAWLGYLFLYQNYLLHNWHRGLPLPSKTPYIILGVLMGATFLAFELWRNRNVLFDGRSQGIAEVHPENSVPENFEDVSSSDAEV

SEQ ID NO: 1734 - protein, 168 aa, Thermococcus kodakaraensis KOD1
  misc_feature (321437)..(321437): n is a or c or g or t.
  misc_feature (527833)..(527833): n is a or c or g or t.
  misc_feature (527901)..(527901): n is a or c or g or t.
  misc_feature (527978)..(527978): n is a or c or g or t.
  misc_feature (960838)..(960839): n is a or c or g or t.
  misc_feature (960860)..(960861): n is a or c or g or t.
  misc_feature (960872)..(960873): n is a or c or g or t.
  misc_feature (960879)..(960879): n is a or c or g or t.
  misc_feature (960890)..(960890): n is a or c or g or t.
  misc_feature (1250239)..(1250239): n is a or c or g or t.
  misc_feature (1302432)..(1302434): n is a or c or g or t.
  misc_feature (1302471)..(1302471): n is a or c or g or t.
  misc_feature (1302488)..(1302488): n is a or c or g or t.
  misc_feature (1674836)..(1674836): n is a or c or g or t.
VIPMERKTDVERRIIKSLFTVPLKDIILVIVGLKGEAHGYEILKELEKLAIGLWKPSHSNLYTILNKMVEEGLLEPREEYRGRVRRVKYRLTDKGWEYLKTSNNLTLRILYTAVEYHEALKKKLEEIGKTRQMRRETIMEYLELLKRIRDVLDEEISTIERELEGTSP

SEQ ID NO: 1735 - protein, 183 aa, Thermococcus kodakaraensis KOD1
  misc_feature (321437)..(321437): n is a or c or g or t.
  misc_feature (527833)..(527833): n is a or c or g or t.
  misc_feature (527901)..(527901): n is a or c or g or t.
  misc_feature (527978)..(527978): n is a or c or g or t.
  misc_feature (960838)..(960839): n is a or c or g or t.
  misc_feature (960860)..(960861): n is a or c or g or t.
  misc_feature (960872)..(960873): n is a or c or g or t.
  misc_feature (960879)..(960879): n is a or c or g or t.
  misc_feature (960890)..(960890): n is a or c or g or t.
  misc_feature (1250239)..(1250239): n is a or c or g or t.
  misc_feature (1302432)..(1302434): n is a or c or g or t.
  misc_feature (1302471)..(1302471): n is a or c or g or t.
  misc_feature (1302488)..(1302488): n is a or c or g or t.
  misc_feature (1674836)..(1674836): n is a or c or g or t.
MGTKIVLIILNPPLNMSSKIHLIYKRIPNRVLEREDEVLADIGDVVVAKSEFSGMLAPLFVNGVKVVDNGYKMVYFAFIGRNYDILKVYDEKGYFKGLYVDVLAYTKRYGDTIEMLDLFLDIFVFPSGEAFLLDEDELEMALNYRLIDKKTFDFAYSVANEILEKLKRGEFPQEIVWKYEWRD

SEQ ID NO: 1736 - protein, 101 aa, Thermococcus kodakaraensis KOD1
  misc_feature (321437)..(321437): n is a or c or g or t.
  misc_feature (527833)..(527833): n is a or c or g or t.
  misc_feature (527901)..(527901): n is a or c or g or t.
  misc_feature (527978)..(527978): n is a or c or g or t.
  misc_feature (960838)..(960839): n is a or c or g or t.
  misc_feature (960860)..(960861): n is a or c or g or t.
  misc_feature (960872)..(960873): n is a or c or g or t.
  misc_feature (960879)..(960879): n is a or c or g or t.
  misc_feature (960890)..(960890): n is a or c or g or t.
  misc_feature (1250239)..(1250239): n is a or c or g or t.
  misc_feature (1302432)..(1302434): n is a or c or g or t.
  misc_feature (1302471)..(1302471): n is a or c or g or t.
  misc_feature (1302488)..(1302488): n is a or c or g or t.
  misc_feature (1674836)..(1674836): n is a or c or g or t.
MDVREKIEKVLAEFNRLHGSEANARILSIEGDEVIIEFEGSFCATCGLYDYFDDIKWEAMEFGLELEPVEVLGAVEDDFEHGRYVVKYKLGRKPVLSLSND

SEQ ID NO: 1737 - protein, 350 aa, Thermococcus kodakaraensis KOD1
  misc_feature (321437)..(321437): n is a or c or g or t.
  misc_feature (527833)..(527833): n is a or c or g or t.
  misc_feature (527901)..(527901): n is a or c or g or t.
  misc_feature (527978)..(527978): n is a or c or g or t.
  misc_feature (960838)..(960839): n is a or c or g or t.
  misc_feature (960860)..(960861): n is a or c or g or t.
  misc_feature (960872)..(960873): n is a or c or g or t.
  misc_feature (960879)..(960879): n is a or c or g or t.
  misc_feature (960890)..(960890): n is a or c or g or t.
  misc_feature (1250239)..(1250239): n is a or c or g or t.
  misc_feature (1302432)..(1302434): n is a or c or g or t.
  misc_feature (1302471)..(1302471): n is a or c or g or t.
  misc_feature (1302488)..(1302488): n is a or c or g or t.
  misc_feature (1674836)..(1674836): n is a or c or g or t.
MHTLLLTALVIVFLWDGYFFINYIISLFRNYVTTDRTPRVSIIIPAYNEGERCRRAIEAALAQDYPDFEVIFVDDGSEDNTYDVASSIRDPRLKVFRIAHGGKSKALNFGLSKARGEIIVTTDADSALEKSAVKELVRRFYSEDVLGVGGQVRVLGNSFLERAQDVEHLRIATFRRAKELEDLSVAPGPISAFRKGALERIGGFVEDPVEDYATTKAIKKLGRVVYAPKARVWTEMPKDIRTLWRQRKRWFLGDLRNLGGGLTKEWGFLLLGDFIAILDIVVPVLLLVFGYWWAFGLWWAFETLTMLIPVLVEGGGITTSLIFPAVLWFWAVFYLILHLYGYSKWVLGKL

SEQ ID NO: 1738 - protein, 632 aa, Thermococcus kodakaraensis KOD1
  misc_feature (321437)..(321437): n is a or c or g or t.
  misc_feature (527833)..(527833): n is a or c or g or t.
  misc_feature (527901)..(527901): n is a or c or g or t.
  misc_feature (527978)..(527978): n is a or c or g or t.
  misc_feature (960838)..(960839): n is a or c or g or t.
  misc_feature (960860)..(960861): n is a or c or g or t.
  misc_feature (960872)..(960873): n is a or c or g or t.
  misc_feature (960879)..(960879): n is a or c or g or t.
  misc_feature (960890)..(960890): n is a or c or g or t.
  misc_feature (1250239)..(1250239): n is a or c or g or t.
  misc_feature (1302432)..(1302434): n is a or c or g or t.
  misc_feature (1302471)..(1302471): n is a or c or g or t.
  misc_feature (1302488)..(1302488): n is a or c or g or t.
  misc_feature (1674836)..(1674836): n is a or c or g or t.
MVKGLTEKDLGKFKLVGNIDALGRKLVFQVTEISVEKDDYFSRLYLYDGRRVEPFTSGKKDANPRFSPDGKLVAFTSKRDKESKEAELYVIPTDGGEARLLAKFKYGIKNLRFTEDGKGIAVVTPIDVEKKPKDDVHIIKELPFWFNGVGWIYGKRSVVYLVDVESGKKKRLTPKNLDVGQIRFHNGKLYFTAQEDRERKPMVSDLYVLEGRKAKRLTPGKWSISDFIPLDDGTFILKANTRERGIPTNTHIYHYNPETGEMRKLTKDLDRAAYNSLNSDVRGAQRAELVFRDGWVYYIATDGPRANLFRVNLDGKIERVIGGDRSVESFAIGDYIAFTAQDAVTPLELYVLRDGKEKKVTDFNGWIKEYSLSKPEHFKVKASDGVEIDAWIMKPVNFEPGKKYPAVLEIHGGPKTAYGYAFMHEFHVLTAKGFAVIFSNPRGSDGYGEEFADIRGHYGERDYQDIMEVVDEAVKRFDFIDPERIGVTGGSYGGFMTNWIVGHTNRFKAAVTQRSISNWTSFFGTTDIGYFFAPDQIGGDPWSNTEGYWEKSPLKYAPNVETPLLIIHSMEDYRCWLPEALQFFTALKYLGKTVELALFPGENHDLSRSGKPKHRVRRLELIAGWMERWLNK

SEQ ID NO: 1739 - protein, 45 aa, Thermococcus kodakaraensis KOD1
  misc_feature (321437)..(321437): n is a or c or g or t.
  misc_feature (527833)..(527833): n is a or c or g or t.
  misc_feature (527901)..(527901): n is a or c or g or t.
  misc_feature (527978)..(527978): n is a or c or g or t.
  misc_feature (960838)..(960839): n is a or c or g or t.
  misc_feature (960860)..(960861): n is a or c or g or t.
  misc_feature (960872)..(960873): n is a or c or g or t.
  misc_feature (960879)..(960879): n is a or c or g or t.
  misc_feature (960890)..(960890): n is a or c or g or t.
  misc_feature (1250239)..(1250239): n is a or c or g or t.
  misc_feature (1302432)..(1302434): n is a or c or g or t.
  misc_feature (1302471)..(1302471): n is a or c or g or t.
  misc_feature (1302488)..(1302488): n is a or c or g or t.
  misc_feature (1674836)..(1674836): n is a or c or g or t.
VHIDYTKCAVVFSRTLGCSVCVKECTFTKGSYERIKRAYEKVAGR

SEQ ID NO: 1740 - protein, 171 aa, Thermococcus kodakaraensis KOD1
  misc_feature (321437)..(321437): n is a or c or g or t.
  misc_feature (527833)..(527833): n is a or c or g or t.
  misc_feature (527901)..(527901): n is a or c or g or t.
  misc_feature (527978)..(527978): n is a or c or g or t.
  misc_feature (960838)..(960839): n is a or c or g or t.
  misc_feature (960860)..(960861): n is a or c or g or t.
  misc_feature (960872)..(960873): n is a or c or g or t.
  misc_feature (960879)..(960879): n is a or c or g or t.
  misc_feature (960890)..(960890): n is a or c or g or t.
  misc_feature (1250239)..(1250239): n is a or c or g or t.
  misc_feature (1302432)..(1302434): n is a or c or g or t.
  misc_feature (1302471)..(1302471): n is a or c or g or t.
  misc_feature (1302488)..(1302488): n is a or c or g or t.
  misc_feature (1674836)..(1674836): n is a or c or g or t.
VLGIGSLYFYYRVIFSPRFLRDYDVKNIEIPEFEGVQIISPEDFKNIKAQLENVPVLAFLRTLKPPESWKPFFFTTANNMEIPNTIRPTDLYKMVETVHRYLLEAERSGVKGIVLVEGLEYLRIHNEFPSIAKMMSTVRDYIISNKGALIVVIDKNALDEREYMLLRRILE

SEQ ID NO: 1741 - protein, 208 aa, Thermococcus kodakaraensis KOD1
  misc_feature (321437)..(321437): n is a or c or g or t.
  misc_feature (527833)..(527833): n is a or c or g or t.
  misc_feature (527901)..(527901): n is a or c or g or t.
  misc_feature (527978)..(527978): n is a or c or g or t.
  misc_feature (960838)..(960839): n is a or c or g or t.
  misc_feature (960860)..(960861): n is a or c or g or t.
  misc_feature (960872)..(960873): n is a or c or g or t.
  misc_feature (960879)..(960879): n is a or c or g or t.
  misc_feature (960890)..(960890): n is a or c or g or t.
  misc_feature (1250239)..(1250239): n is a or c or g or t.
  misc_feature (1302432)..(1302434): n is a or c or g or t.
  misc_feature (1302471)..(1302471): n is a or c or g or t.
  misc_feature (1302488)..(1302488): n is a or c or g or t.
  misc_feature (1674836)..(1674836): n is a or c or g or t.
VSPLSVSFMYREKYDRIAGFYELLERPLDRFFNPLRESAVSLAEGKTLEIGVGTGKTLRYYPQDVELYAIDGSEKMLEMAKKRAKELGMDVKFKVAEAESLPFPDDFFDTVVSSFVFCTVPEPERAIEEIKRVLKPDGMAIFLEHTKSESELVNYLFLLPMKLILKPLLDDDPLRDTHKLVRKHFKVEKEEAYYSGVVRLIVAKNDKD

SEQ ID NO: 1742 - protein, 244 aa, Thermococcus kodakaraensis KOD1
  misc_feature (321437)..(321437): n is a or c or g or t.
  misc_feature (527833)..(527833): n is a or c or g or t.
  misc_feature (527901)..(527901): n is a or c or g or t.
  misc_feature (527978)..(527978): n is a or c or g or t.
  misc_feature (960838)..(960839): n is a or c or g or t.
  misc_feature (960860)..(960861): n is a or c or g or t.
  misc_feature (960872)..(960873): n is a or c or g or t.
  misc_feature (960879)..(960879): n is a or c or g or t.
  misc_feature (960890)..(960890): n is a or c or g or t.
  misc_feature (1250239)..(1250239): n is a or c or g or t.
  misc_feature (1302432)..(1302434): n is a or c or g or t.
  misc_feature (1302471)..(1302471): n is a or c or g or t.
  misc_feature (1302488)..(1302488): n is a or c or g or t.
  misc_feature (1674836)..(1674836): n is a or c or g or t.
VRLRGVSSLKVLTIARKELKEYVLKPGSISWGVVFPIVFTLAFIVRFGDIDHLAPGLVSISIVFGTTSFVASSIIFERRLRTFERLLVAPVSYIEIILAKLLVGSLFGLFVALVSLALVSHFMVYPVWNVPMVVGYAFLGGLAFSGLALYISLVVENPISAMTWLNLLRLPMMFTSGAIASLLLFPRWFLIAGYLTPMTYLVEGLRFSMLKYTEVVHPVYSALILIFLTLLFTYLSIERLKNLY

SEQ ID NO: 1743 - protein, 156 aa, Thermococcus kodakaraensis KOD1
  misc_feature (321437)..(321437): n is a or c or g or t.
  misc_feature (527833)..(527833): n is a or c or g or t.
  misc_feature (527901)..(527901): n is a or c or g or t.
  misc_feature (527978)..(527978): n is a or c or g or t.
  misc_feature (960838)..(960839): n is a or c or g or t.
  misc_feature (960860)..(960861): n is a or c or g or t.
  misc_feature (960872)..(960873): n is a or c or g or t.
  misc_feature (960879)..(960879): n is a or c or g or t.
  misc_feature (960890)..(960890): n is a or c or g or t.
  misc_feature (1250239)..(1250239): n is a or c or g or t.
  misc_feature (1302432)..(1302434): n is a or c or g or t.
  misc_feature (1302471)..(1302471): n is a or c or g or t.
  misc_feature (1302488)..(1302488): n is a or c or g or t.
  misc_feature (1674836)..(1674836): n is a or c or g or t.
VSLILIKPLPKEFQVMLMAEKRCLKVAFGMEDDEHLIDAHYGDSEFFAIYEICEDGSIKLLEKRHNKAKDIEEEHDEGHGDPRKFKAVVSQLLDVDVLAAFRMGPNFLRIRDKTNKVAFFTRTRDLNLALQRVVENFDDLWEQVQKKKTEKPPIEE

SEQ ID NO: 1744 - protein, 179 aa, Thermococcus kodakaraensis KOD1
  misc_feature (321437)..(321437): n is a or c or g or t.
  misc_feature (527833)..(527833): n is a or c or g or t.
  misc_feature (527901)..(527901): n is a or c or g or t.
  misc_feature (527978)..(527978): n is a or c or g or t.
  misc_feature (960838)..(960839): n is a or c or g or t.
  misc_feature (960860)..(960861): n is a or c or g or t.
  misc_feature (960872)..(960873): n is a or c or g or t.
  misc_feature (960879)..(960879): n is a or c or g or t.
  misc_feature (960890)..(960890): n is a or c or g or t.
  misc_feature (1250239)..(1250239): n is a or c or g or t.
  misc_feature (1302432)..(1302434): n is a or c or g or t.
  misc_feature (1302471)..(1302471): n is a or c or g or t.
  misc_feature (1302488)..(1302488): n is a or c or g or t.
  misc_feature (1674836)..(1674836): n is a or c or g or t.
MDGGNTQKERPGSYRGLELLPVHLYVLAHLKKAGVDYAKMMVKMSELPLSLIEDAIRDLMEAGLVERDSGSAIKRSKARFKKAFEVHKHHTYYRLSREGELFVRRIDEKWLKEYFNALFSDGWRVVKELSRSGKFDGLPKEFQREEIREELLVYRFITPLGRTTRFFNLLVEFLEIRAR

SEQ ID NO: 1745 - protein, 191 aa, Thermococcus kodakaraensis KOD1
  misc_feature (321437)..(321437): n is a or c or g or t.
  misc_feature (527833)..(527833): n is a or c or g or t.
  misc_feature (527901)..(527901): n is a or c or g or t.
  misc_feature (527978)..(527978): n is a or c or g or t.
  misc_feature (960838)..(960839): n is a or c or g or t.
  misc_feature (960860)..(960861): n is a or c or g or t.
  misc_feature (960872)..(960873): n is a or c or g or t.
  misc_feature (960879)..(960879): n is a or c or g or t.
  misc_feature (960890)..(960890): n is a or c or g or t.
  misc_feature (1250239)..(1250239): n is a or c or g or t.
  misc_feature (1302432)..(1302434): n is a or c or g or t.
  misc_feature (1302471)..(1302471): n is a or c or g or t.
  misc_feature (1302488)..(1302488): n is a or c or g or t.
  misc_feature (1674836)..(1674836): n is a or c or g or t.
VSCHYSRHKAGSWLEVGTLCGGLRADLGVHSGPAHSRGGGCVPMSRINLGQVKWLTGIFGLLYLIGGIIEVLAYFGKEIKVIGVPTGDLFAAFALFTISAVYLTGLKRAVEGDLRSVSYLYVGALLSIGLALIAVLVMGSDAIEAYLLHNEDFAGWSPLDDVTTYLVLGVLSVIAYLPVKDVSKNPIKVRA

SEQ ID NO: 1746 - protein, 297 aa, Thermococcus kodakaraensis KOD1
  misc_feature (321437)..(321437): n is a or c or g or t.
  misc_feature (527833)..(527833): n is a or c or g or t.
  misc_feature (527901)..(527901): n is a or c or g or t.
  misc_feature (527978)..(527978): n is a or c or g or t.
  misc_feature (960838)..(960839): n is a or c or g or t.
  misc_feature (960860)..(960861): n is a or c or g or t.
  misc_feature (960872)..(960873): n is a or c or g or t.
  misc_feature (960879)..(960879): n is a or c or g or t.
  misc_feature (960890)..(960890): n is a or c or g or t.
  misc_feature (1250239)..(1250239): n is a or c or g or t.
  misc_feature (1302432)..(1302434): n is a or c or g or t.
  misc_feature (1302471)..(1302471): n is a or c or g or t.
  misc_feature (1302488)..(1302488): n is a or c or g or t.
  misc_feature (1674836)..(1674836): n is a or c or g or t.
VMQVAIASGKGGVGKSTITASLLYLLKDDYSFVAVDADAEAPNLGLLLGVTEWEEEREHIGAKIARINTESCVRCGICYERCPYGCIYIDDEGNYVVNELTCEGCNVCGLVCPVAGTITLEEVRSGVIRKATTKYGFPLISAQLDVGRPESGKLVTEEKEWAAKLMKELNLEHMIVDSAAGIGCQVIASLGGADVAILIAEPTPASLSDVQRAYKVVQHFREPAYLIINKADINPGFTGLEEWAEKEGIPILGRIPYDRAVPESMSMLKPVVEAFPEAKASKAIVEIAEVIKREILG

SEQ ID NO: 1747 - protein, 443 aa, Thermococcus kodakaraensis KOD1
  misc_feature (321437)..(321437): n is a or c or g or t.
  misc_feature (527833)..(527833): n is a or c or g or t.
  misc_feature (527901)..(527901): n is a or c or g or t.
  misc_feature (527978)..(527978): n is a or c or g or t.
  misc_feature (960838)..(960839): n is a or c or g or t.
  misc_feature (960860)..(960861): n is a or c or g or t.
  misc_feature (960872)..(960873): n is a or c or g or t.
  misc_feature (960879)..(960879): n is a or c or g or t.
  misc_feature (960890)..(960890): n is a or c or g or t.
  misc_feature (1250239)..(1250239): n is a or c or g or t.
  misc_feature (1302432)..(1302434): n is a or c or g or t.
  misc_feature (1302471)..(1302471): n is a or c or g or t.
  misc_feature (1302488)..(1302488): n is a or c or g or t.
  misc_feature (1674836)..(1674836): n is a or c or g or t.
VVKMFDVNEFILKRAKELGFGDVVVLSYETNRRQVRFANNEITVAKNWHERKIELFVEKEKRVASTTITDLSNENIERILKTLLSNIRGMSPKEDYYGIAEGPFEYKDIPETFDRAIVELDEPNEYVERAINAALEEGAKRVAGVLYTDHNKLYLTTSNGVEAFDEGTGIEISVRAFIGDLESGHGTNSVRVLKKFDPESAGRKAGEIARLARNPEQGPEGKFDVIFDPLAFANLLSYMSFMTSAYAAEAGFSFLVNKLGQKVAADGVTIKDIGNLPNGYGTRKFDDEGVPTRETTIIENGTFRTFLLNTSLARKYGTETTANAGLVMPHAWNIVLEPGDYSKEELFSEVKKGIYITNVWYTRFQNYVAGDFSTIPRDGIFLVENGELKPIRNIRVSDNLQRILENIVALGKELYHIHWWEVNTPVSTPYVLVKDVGITRATK

SEQ ID NO: 1748 - protein, 234 aa, Thermococcus kodakaraensis KOD1
  misc_feature (321437)..(321437): n is a or c or g or t.
  misc_feature (527833)..(527833): n is a or c or g or t.
  misc_feature (527901)..(527901): n is a or c or g or t.
  misc_feature (527978)..(527978): n is a or c or g or t.
  misc_feature (960838)..(960839): n is a or c or g or t.
  misc_feature (960860)..(960861): n is a or c or g or t.
  misc_feature (960872)..(960873): n is a or c or g or t.
  misc_feature (960879)..(960879): n is a or c or g or t.
  misc_feature (960890)..(960890): n is a or c or g or t.
  misc_feature (1250239)..(1250239): n is a or c or g or t.
  misc_feature (1302432)..(1302434): n is a or c or g or t.
  misc_feature (1302471)..(1302471): n is a or c or g or t.
  misc_feature (1302488)..(1302488): n is a or c or g or t.
  misc_feature (1674836)..(1674836): n is a or c or g or t.
MSFVRKFGTIYRTDLKLLRRDPMLLYSVAMTLVLLLIVRYFKDRIGVYYSLLALLGLIFIPMIFGMLPGFMMADEKEDKTIQALKVIPISSEAFLAYRLTWASIVTALLTAAAPYILDIEIPQKGILALIALFLLEVWIYGLLITVFSESRMQALTVSKVLGWLLMLPPVIKLVVVWRNLSTDWSRFTAFLPTYWLYKVFEGIPTNDYSDFPIALAVHLAWLVPLVLLFRRRVL

SEQ ID NO: 1749 - protein, 407 aa, Thermococcus kodakaraensis KOD1
  misc_feature (321437)..(321437): n is a or c or g or t.
  misc_feature (527833)..(527833): n is a or c or g or t.
  misc_feature (527901)..(527901): n is a or c or g or t.
  misc_feature (527978)..(527978): n is a or c or g or t.
  misc_feature (960838)..(960839): n is a or c or g or t.
  misc_feature (960860)..(960861): n is a or c or g or t.
  misc_feature (960872)..(960873): n is a or c or g or t.
  misc_feature (960879)..(960879): n is a or c or g or t.
  misc_feature (960890)..(960890): n is a or c or g or t.
  misc_feature (1250239)..(1250239): n is a or c or g or t.
  misc_feature (1302432)..(1302434): n is a or c or g or t.
  misc_feature (1302471)..(1302471): n is a or c or g or t.
  misc_feature (1302488)..(1302488): n is a or c or g or t.
  misc_feature (1674836)..(1674836): n is a or c or g or t.
MYPSVHPGGERLPISDGIERKKVPTSSGRYYSMRIAAQRRKKVMLIQGLRRKKGTHGLRTSPIRVEKAHITKGEALAILVGTQIGAGVLGLPYAASKVGLIPALGVLIGVMFLMLWTAMIVLRFSAEMGGAQMSTAAQRILGRAGGWLMYLSISLMSFGAVLAYIVGMGNVISSLFGVSDTVGAAVFWVLASIVVYKGLEASGKTELAMSFVMLFLFIAVTAMILPHAELEKGLYVDLSGLWSITGVAIFALGCHTVIPDVYKGLGSYEETKKVVVWAFIIPTVIYAIFMATFLLVFGRDTPQMATQGLELLYGKLGWLIGNLIPLLAITTSYIGIALAQQSNNEEFVKLKRPVAWALTVIPPAIVYFAGVRNFADVLALAGDTGDMIAFIVLPILMWLAYRIKHRK

SEQ ID NO: 1750 - protein, 290 aa, Thermococcus kodakaraensis KOD1
  misc_feature (321437)..(321437): n is a or c or g or t.
  misc_feature (527833)..(527833): n is a or c or g or t.
  misc_feature (527901)..(527901): n is a or c or g or t.
  misc_feature (527978)..(527978): n is a or c or g or t.
  misc_feature (960838)..(960839): n is a or c or g or t.
  misc_feature (960860)..(960861): n is a or c or g or t.
  misc_feature (960872)..(960873): n is a or c or g or t.
  misc_feature (960879)..(960879): n is a or c or g or t.
  misc_feature (960890)..(960890): n is a or c or g or t.
  misc_feature (1250239)..(1250239): n is a or c or g or t.
  misc_feature (1302432)..(1302434): n is a or c or g or t.
  misc_feature (1302471)..(1302471): n is a or c or g or t.
  misc_feature (1302488)..(1302488): n is a or c or g or t.
  misc_feature (1674836)..(1674836): n is a or c or g or t.
MGLVMWLRTGVLMAILTGLLMGIGYLFGGPNVAFIMFLFSMFFNFITYWYSDRIVLSWYNARIVDEYEAPELYAIVRDLAQRAGLPTPSVAIIPSETPNAFATGRDPKHAVVAVTQGLLRILNRDELEGVIGHELTHIKNRDILIGTVAAAMAGAIMQLAYWARWIAIFGGFNRDRDDGGDIIGAILVAILAPIAAMLIQAAISRSREFLADEGGARISGKPHALASALMKIEQAVNYRPMREGNPATAHMFIVNPFRGMSIANLFSTHPPTEARIERLRKIAEEMGIYF

SEQ ID NO: 1751 - protein, 32 aa, Thermococcus kodakaraensis KOD1
  misc_feature (321437)..(321437): n is a or c or g or t.
  misc_feature (527833)..(527833): n is a or c or g or t.
  misc_feature (527901)..(527901): n is a or c or g or t.
  misc_feature (527978)..(527978): n is a or c or g or t.
  misc_feature (960838)..(960839): n is a or c or g or t.
  misc_feature (960860)..(960861): n is a or c or g or t.
  misc_feature (960872)..(960873): n is a or c or g or t.
  misc_feature (960879)..(960879): n is a or c or g or t.
  misc_feature (960890)..(960890): n is a or c or g or t.
  misc_feature (1250239)..(1250239): n is a or c or g or t.
  misc_feature (1302432)..(1302434): n is a or c or g or t.
  misc_feature (1302471)..(1302471): n is a or c or g or t.
  misc_feature (1302488)..(1302488): n is a or c or g or t.
  misc_feature (1674836)..(1674836): n is a or c or g or t.
MFSESRVEMNSFLLSHAAAFVSAKLLTKPEYK

SEQ ID NO: 1752 - protein, 30 aa, Thermococcus kodakaraensis KOD1
  misc_feature (321437)..(321437): n is a or c or g or t.
  misc_feature (527833)..(527833): n is a or c or g or t.
  misc_feature (527901)..(527901): n is a or c or g or t.
  misc_feature (527978)..(527978): n is a or c or g or t.
  misc_feature (960838)..(960839): n is a or c or g or t.
  misc_feature (960860)..(960861): n is a or c or g or t.
  misc_feature (960872)..(960873): n is a or c or g or t.
  misc_feature (960879)..(960879): n is a or c or g or t.
  misc_feature (960890)..(960890): n is a or c or g or t.
  misc_feature (1250239)..(1250239): n is a or c or g or t.
  misc_feature (1302432)..(1302434): n is a or c or g or t.
  misc_feature (1302471)..(1302471): n is a or c or g or t.
  misc_feature (1302488)..(1302488): n is a or c or g or t.
  misc_feature (1674836)..(1674836): n is a or c or g or t.
VAGVYTTIVKYSDSSWEFRAYAFFNMIDWV

SEQ ID NO: 1753 - protein, 348 aa, Thermococcus kodakaraensis KOD1
  misc_feature (321437)..(321437): n is a or c or g or t.
  misc_feature (527833)..(527833): n is a or c or g or t.
  misc_feature (527901)..(527901): n is a or c or g or t.
  misc_feature (527978)..(527978): n is a or c or g or t.
  misc_feature (960838)..(960839): n is a or c or g or t.
  misc_feature (960860)..(960861): n is a or c or g or t.
  misc_feature (960872)..(960873): n is a or c or g or t.
  misc_feature (960879)..(960879): n is a or c or g or t.
  misc_feature (960890)..(960890): n is a or c or g or t.
  misc_feature (1250239)..(1250239): n is a or c or g or t.
  misc_feature (1302432)..(1302434): n is a or c or g or t.
  misc_feature (1302471)..(1302471): n is a or c or g or t.
  misc_feature (1302488)..(1302488): n is a or c or g or t.
  misc_feature (1674836)..(1674836): n is a or c or g or t.
VRFYICREKGEPKPFRIAIIGAGPAGLSAAGYLACRGYEVHVYEKMPEGGGMVAFGIPETRIPIRTVRGGVRDLERLGVNFHFRTKVVYDSPRELGDEWAEHFVSLERLLGEFDAILIATGAWRPRKLKVPGADLPGVYDALSLLHHIKMARIGYYSWEGIPDLKGKHIVVIGAGYTAVDVAIEGRLLGAEKITMVYRRGLEHSYAKTEIRKLIEEGVEFIEFATPVRIIGDERVQGVEFAKTRIEEGSVITTDERFILDADIVAYAIGQLPTSPIREVVCANEEILKEAGIFFAGDVVAPRNIGTAMREGKERAKEIEEWLLKKAPKKVFPVPVAARLISEVANGKC

SEQ ID NO: 1754 - protein, 337 aa, Thermococcus kodakaraensis KOD1
  misc_feature (321437)..(321437): n is a or c or g or t.
  misc_feature (527833)..(527833): n is a or c or g or t.
  misc_feature (527901)..(527901): n is a or c or g or t.
  misc_feature (527978)..(527978): n is a or c or g or t.
  misc_feature (960838)..(960839): n is a or c or g or t.
  misc_feature (960860)..(960861): n is a or c or g or t.
  misc_feature (960872)..(960873): n is a or c or g or t.
  misc_feature (960879)..(960879): n is a or c or g or t.
  misc_feature (960890)..(960890): n is a or c or g or t.
  misc_feature (1250239)..(1250239): n is a or c or g or t.
  misc_feature (1302432)..(1302434): n is a or c or g or t.
  misc_feature (1302471)..(1302471): n is a or c or g or t.
  misc_feature (1302488)..(1302488): n is a or c or g or t.
  misc_feature (1674836)..(1674836): n is a or c or g or t.
MTEPKDIVLKESEEVEGIPIEGPWLDDVSSLEEVLDYYERIGFQATHLGKAIEIWKKVEKRRAEGKEVRVFLGYTSNIISSGLRELVAWLVKEGKIDVIVTTAGGIEEDFIKALKPFILGDWHVNDALMREKGINRIGNIFVPNDRYIEFEKYMIPFFERVLEIEKERGKPLTASEFIYELGRYMDEKLGKEKERSVIYWAYKRNVPIFCPAITDGSIGDMLYFFKEERGDRELIIDIANDIVKLNNLAVTAKETASIILGGSLPKHAIINANLFRGGTDYAIYITTAVPWDGSLSGAPPSEGVSWGKIRAKADYVEIWADATLVFPLLVWKVMKAP

SEQ ID NO: 1755 - protein, 252 aa, Thermococcus kodakaraensis KOD1
  misc_feature (321437)..(321437): n is a or c or g or t.
  misc_feature (527833)..(527833): n is a or c or g or t.
  misc_feature (527901)..(527901): n is a or c or g or t.
  misc_feature (527978)..(527978): n is a or c or g or t.
  misc_feature (960838)..(960839): n is a or c or g or t.
  misc_feature (960860)..(960861): n is a or c or g or t.
  misc_feature (960872)..(960873): n is a or c or g or t.
  misc_feature (960879)..(960879): n is a or c or g or t.
  misc_feature (960890)..(960890): n is a or c or g or t.
  misc_feature (1250239)..(1250239): n is a or c or g or t.
  misc_feature (1302432)..(1302434): n is a or c or g or t.
  misc_feature (1302471)..(1302471): n is a or c or g or t.
  misc_feature (1302488)..(1302488): n is a or c or g or t.
  misc_feature (1674836)..(1674836): n is a or c or g or t.
MRVAIMTGDVRVYYLATKVLKEYGIPFLSLRVGEKIPYDVEVVLTGEKDKVEFPVKVIVRDENFIDDLLARLEGRKRFQNVFIAIDPGDRPGMSVVADGRVIEVHRLKSPKDVEPVVGLLEKYPTAKLKVGNGAKRQRTMMLKALGEVLGYDYPIIIVNESRTTPKVGGVESSSVVDIVASINIGLREGRETTIGDVLEVKEPTKKEIEHIKRRSRELSGNITISSRLAREVALGNLTLEEAIEIHRRGRSR

SEQ ID NO: 1756 - protein, 152 aa, Thermococcus kodakaraensis KOD1
  misc_feature (321437)..(321437): n is a or c or g or t.
  misc_feature (527833)..(527833): n is a or c or g or t.
  misc_feature (527901)..(527901): n is a or c or g or t.
  misc_feature (527978)..(527978): n is a or c or g or t.
  misc_feature (960838)..(960839): n is a or c or g or t.
  misc_feature (960860)..(960861): n is a or c or g or t.
  misc_feature (960872)..(960873): n is a or c or g or t.
  misc_feature (960879)..(960879): n is a or c or g or t.
  misc_feature (960890)..(960890): n is a or c or g or t.
  misc_feature (1250239)..(1250239): n is a or c or g or t.
  misc_feature (1302432)..(1302434): n is a or c or g or t.
  misc_feature (1302471)..(1302471): n is a or c or g or t.
  misc_feature (1302488)..(1302488): n is a or c or g or t.
  misc_feature (1674836)..(1674836): n is a or c or g or t.
MKLSDLVYLKSGRILMTGSPRRIARIFINEWAREGYKILAEGLPFVVDGDVFIGDPLENPGFDAYLILNPLSRSKEERKKLYGWLEENRDKLILLYEPKYVGDSITRYQIRNFIDYLLAYRRETLGAEVIKLYRIENGRVVESREFIRRRGP

SEQ ID NO: 1757 - protein, 375 aa, Thermococcus kodakaraensis KOD1
  misc_feature (321437)..(321437): n is a or c or g or t.
  misc_feature (527833)..(527833): n is a or c or g or t.
  misc_feature (527901)..(527901): n is a or c or g or t.
  misc_feature (527978)..(527978): n is a or c or g or t.
  misc_feature (960838)..(960839): n is a or c or g or t.
  misc_feature (960860)..(960861): n is a or c or g or t.
  misc_feature (960872)..(960873): n is a or c or g or t.
  misc_feature (960879)..(960879): n is a or c or g or t.
  misc_feature (960890)..(960890): n is a or c or g or t.
  misc_feature (1250239)..(1250239): n is a or c or g or t.
  misc_feature (1302432)..(1302434): n is a or c or g or t.
  misc_feature (1302471)..(1302471): n is a or c or g or t.
  misc_feature (1302488)..(1302488): n is a or c or g or t.
  misc_feature (1674836)..(1674836): n is a or c or g or t.
MEGGSLTFLPKTHDGQTPIVIYNDIHPFQPVVKMFGKLREKLKKFTKQVEEKIEEEEKAVEAPMAGEEIQKAVQESTETEGEKPGFLGRLLQVEIKEKDIEDALDELEIELLEADVALETVEALREKIKEKLVGRKVRIGTNKGKIIEEALKEAILEILTPEKKIDLLQMIKSKEDKPFVIAFVGFNGSGKTTTIAKLAHWLKKNGFSVVIAASDTFRAGAIEQLEEHAKRVGVKVIKHDYGADPAAVAYDAIQHAKARGIDVVLIDTAGRNELNRNLMDEMKKIARVTKPDLVIFVGDSLGGNAVVEQAKQFNEAVRIDGVILTKLDADARGGAALSISHAIGAPILFVGVGQGYEDLRPFDEKWFVERIFGED

SEQ ID NO: 1758 - protein, 663 aa, Thermococcus kodakaraensis KOD1
  misc_feature (321437)..(321437): n is a or c or g or t.
  misc_feature (527833)..(527833): n is a or c or g or t.
  misc_feature (527901)..(527901): n is a or c or g or t.
  misc_feature (527978)..(527978): n is a or c or g or t.
  misc_feature (960838)..(960839): n is a or c or g or t.
  misc_feature (960860)..(960861): n is a or c or g or t.
  misc_feature (960872)..(960873): n is a or c or g or t.
  misc_feature (960879)..(960879): n is a or c or g or t.
  misc_feature (960890)..(960890): n is a or c or g or t.
  misc_feature (1250239)..(1250239): n is a or c or g or t.
  misc_feature (1302432)..(1302434): n is a or c or g or t.
  misc_feature (1302471)..(1302471): n is a or c or g or t.
  misc_feature (1302488)..(1302488): n is a or c or g or t.
  misc_feature (1674836)..(1674836): n is a or c or g or t.
VQLFSTRSRTLLRTSRFCWPCSAALVLTTEWRDEEMKKLGVLLALLVLFGTLATGTVGAVYIPSSGDFGVYIFGSSSNVTISDGRLVLDATGSEYVRAWLNVTEFQAIEFDYQAYANNVLSGVSFMSGSSGVGLTFIEYDTGSIEVRKISGANYPQYDGSSDTIGGSIDAGTSFRNKYVHFRIEFQQRGTEWDLLVYKDGFLLYNLTNVQQHIDPLSIEKVVFGVPAVGIGNNLGWQGKVEFNNIQIYEVEYHIQLSLKDALSNQPLTGVTVKENGNVIGTLDDGGSLDLTKGTHTLTFEKSGYWSVTKTIDVQGDMTVSVEMYPDSAAFKFENFPSDISIPENTIYTLTFTLSPISTDAAYNTYLSLSGLSNVLEVQKDGQAVSPESGKYYLGDISGPTQISIKFKAGAVGQHGFTLSFESHDAIMSKTYTTTKSVTYTVEPLPFSVQMPSEWQVGQNELRISESSGQSYLITAVLKDSQGNEVWSDSHAFSPYEAYSFSVNVPSEGQYTLELQWNGQVATYDVTVNPAITLTTKQLTVEKGGEGTIVLHFKNPSSDVQYYTIKVSGGFLPSEINQSISVGPLTEKDVSIAFAVPEDLTYDAYELQVQVLQGNATVFQDKVAVSIGDSGGFTLFGGSSGNTWLWLGVGGLGLLALVGLARRR

SEQ ID NO: 1759 - protein, 127 aa, Thermococcus kodakaraensis KOD1; identical to SEQ ID NO: 414
  misc_feature (321437)..(321437): n is a or c or g or t.
  misc_feature (527833)..(527833): n is a or c or g or t.
  misc_feature (527901)..(527901): n is a or c or g or t.
  misc_feature (527978)..(527978): n is a or c or g or t.
  misc_feature (960838)..(960839): n is a or c or g or t.
  misc_feature (960860)..(960861): n is a or c or g or t.
  misc_feature (960872)..(960873): n is a or c or g or t.
  misc_feature (960879)..(960879): n is a or c or g or t.
  misc_feature (960890)..(960890): n is a or c or g or t.
  misc_feature (1250239)..(1250239): n is a or c or g or t.
  misc_feature (1302432)..(1302434): n is a or c or g or t.
  misc_feature (1302471)..(1302471): n is a or c or g or t.
  misc_feature (1302488)..(1302488): n is a or c or g or t.
  misc_feature (1674836)..(1674836): n is a or c or g or t.

SEQ ID NO: 1760 - protein, 76 aa, Thermococcus kodakaraensis KOD1
  misc_feature (321437)..(321437): n is a or c or g or t.
  misc_feature (527833)..(527833): n is a or c or g or t.
  misc_feature (527901)..(527901): n is a or c or g or t.
  misc_feature (527978)..(527978): n is a or c or g or t.
  misc_feature (960838)..(960839): n is a or c or g or t.
  misc_feature (960860)..(960861): n is a or c or g or t.
  misc_feature (960872)..(960873): n is a or c or g or t.
  misc_feature (960879)..(960879): n is a or c or g or t.
  misc_feature (960890)..(960890): n is a or c or g or t.
  misc_feature (1250239)..(1250239): n is a or c or g or t.
  misc_feature (1302432)..(1302434): n is a or c or g or t.
  misc_feature (1302471)..(1302471): n is a or c or g or t.
  misc_feature (1302488)..(1302488): n is a or c or g or t.
  misc_feature (1674836)..(1674836): n is a or c or g or t.
MDANSIIDQLHNLAGSHPYLALGLILILIGVLAKGKVSLVFYALGALALLKSFGLVDTFFSFLKQIPELVKSFGGV

SEQ ID NO: 1761 - protein, 267 aa, Thermococcus kodakaraensis KOD1
  misc_feature (321437)..(321437): n is a or c or g or t.
  misc_feature (527833)..(527833): n is a or c or g or t.
  misc_feature (527901)..(527901): n is a or c or g or t.
  misc_feature (527978)..(527978): n is a or c or g or t.
  misc_feature (960838)..(960839): n is a or c or g or t.
  misc_feature (960860)..(960861): n is a or c or g or t.
  misc_feature (960872)..(960873): n is a or c or g or t.
  misc_feature (960879)..(960879): n is a or c or g or t.
  misc_feature (960890)..(960890): n is a or c or g or t.
  misc_feature (1250239)..(1250239): n is a or c or g or t.
  misc_feature (1302432)..(1302434): n is a or c or g or t.
  misc_feature (1302471)..(1302471): n is a or c or g or t.
  misc_feature (1302488)..(1302488): n is a or c or g or t.
  misc_feature (1674836)..(1674836): n is a or c or g or t.
MRKKERQIITVGLILLFAAIGWWAYHGGGGGFVDITNALSDNSTENTTYELAVSNLLAIVDQSTGHVLVSFQLANEEHFNISSVQVLYALNVADPNNATYTALNATAENGTYKAEIPSKFGDVVYYKVKVVYDTDKTLESDVQSITVTDTTAPTLSSVSLDYNSTAGTFSIDFNATDNDQIAKYYVYWADLGTSNTVSNTTTFTEVNATALPITITNVTANDYYAFYFVVEDISGNKAMLYNETAPYVIQANATATWPVVVTEQSSS

SEQ ID NO: 1762 - protein, 184 aa, Thermococcus kodakaraensis KOD1
  misc_feature (321437)..(321437): n is a or c or g or t.
  misc_feature (527833)..(527833): n is a or c or g or t.
  misc_feature (527901)..(527901): n is a or c or g or t.
  misc_feature (527978)..(527978): n is a or c or g or t.
  misc_feature (960838)..(960839): n is a or c or g or t.
  misc_feature (960860)..(960861): n is a or c or g or t.
  misc_feature (960872)..(960873): n is a or c or g or t.
  misc_feature (960879)..(960879): n is a or c or g or t.
  misc_feature (960890)..(960890): n is a or c or g or t.
  misc_feature (1250239)..(1250239): n is a or c or g or t.
  misc_feature (1302432)..(1302434): n is a or c or g or t.
  misc_feature (1302471)..(1302471): n is a or c or g or t.
  misc_feature (1302488)..(1302488): n is a or c or g or t.
  misc_feature (1674836)..(1674836): n is a or c or g or t.
MSEVTFTKRDTYKVTWKDSMEWLQIIFVFAMVNWFFALFSSLPTIIILYYYGLQSYIGTALAGFALAYTAFTLRNWHIISKFVTNKIEAGEVDNKINVISLLLMGITITIYSLIGIALHSEWIPFFIPLWDYYILEKGSWYLTITGWVNKTATALTRTKKDNIYKTVPVGILSFALLLRTLKRF

SEQ ID NO: 1763 - protein, 205 aa, Thermococcus kodakaraensis KOD1
  misc_feature (321437)..(321437): n is a or c or g or t.
  misc_feature (527833)..(527833): n is a or c or g or t.
  misc_feature (527901)..(527901): n is a or c or g or t.
  misc_feature (527978)..(527978): n is a or c or g or t.
  misc_feature (960838)..(960839): n is a or c or g or t.
  misc_feature (960860)..(960861): n is a or c or g or t.
  misc_feature (960872)..(960873): n is a or c or g or t.
  misc_feature (960879)..(960879): n is a or c or g or t.
  misc_feature (960890)..(960890): n is a or c or g or t.
  misc_feature (1250239)..(1250239): n is a or c or g or t.
  misc_feature (1302432)..(1302434): n is a or c or g or t.
  misc_feature (1302471)..(1302471): n is a or c or g or t.
  misc_feature (1302488)..(1302488): n is a or c or g or t.
  misc_feature (1674836)..(1674836): n is a or c or g or t.
MVFKDDIIIPKGKIIKKSELPIDDPNEQDQKWEQLLNTLEKIAPGKYEVEEDEIRISEDILLLKAGKALDEMRAELIMLIDLEVDMNTLTEREFTTGELAHELYTSSAYSIYQFLHGEYRDLIKKRVNDSLKRLSTGPLKGYLKRNHRHKHAWRIKIIDKKQIPMFRETCGKAVRELESKFKTKYIDEYIKIFLTPKTTPKDKRS

SEQ ID NO: 1764 - protein, 60 aa, Thermococcus kodakaraensis KOD1
  misc_feature (321437)..(321437): n is a or c or g or t.
  misc_feature (527833)..(527833): n is a or c or g or t.
  misc_feature (527901)..(527901): n is a or c or g or t.
  misc_feature (527978)..(527978): n is a or c or g or t.
  misc_feature (960838)..(960839): n is a or c or g or t.
  misc_feature (960860)..(960861): n is a or c or g or t.
  misc_feature (960872)..(960873): n is a or c or g or t.
  misc_feature (960879)..(960879): n is a or c or g or t.
  misc_feature (960890)..(960890): n is a or c or g or t.
  misc_feature (1250239)..(1250239): n is a or c or g or t.
  misc_feature (1302432)..(1302434): n is a or c or g or t.
  misc_feature (1302471)..(1302471): n is a or c or g or t.
  misc_feature (1302488)..(1302488): n is a or c or g or t.
  misc_feature (1674836)..(1674836): n is a or c or g or t.
VPLEALSSVAPGIDVEEFQELLNNDPDEAIEMLKGELLAREVVDYGVVFDIDGVEVIENE

SEQ ID NO: 1765 - protein, 76 aa, Thermococcus kodakaraensis KOD1
  misc_feature (321437)..(321437): n is a or c or g or t.
  misc_feature (527833)..(527833): n is a or c or g or t.
  misc_feature (527901)..(527901): n is a or c or g or t.
  misc_feature (527978)..(527978): n is a or c or g or t.
  misc_feature (960838)..(960839): n is a or c or g or t.
  misc_feature (960860)..(960861): n is a or c or g or t.
  misc_feature (960872)..(960873): n is a or c or g or t.
  misc_feature (960879)..(960879): n is a or c or g or t.
  misc_feature (960890)..(960890): n is a or c or g or t.
  misc_feature (1250239)..(1250239): n is a or c or g or t.
  misc_feature (1302432)..(1302434): n is a or c or g or t.
  misc_feature (1302471)..(1302471): n is a or c or g or t.
  misc_feature (1302488)..(1302488): n is a or c or g or t.
  misc_feature (1674836)..(1674836): n is a or c or g or t.
VGMNEEELYTELLRLRGMLNDVIDLFEMSRDGYVARSLIAEAWTDFNIQAGKINTKMYAYAYQDSFIQKKVQEGRL

SEQ ID NO: 1766 - protein, 117 aa, Thermococcus kodakaraensis KOD1
  misc_feature (321437)..(321437): n is a or c or g or t.
  misc_feature (527833)..(527833): n is a or c or g or t.
  misc_feature (527901)..(527901): n is a or c or g or t.
  misc_feature (527978)..(527978): n is a or c or g or t.
  misc_feature (960838)..(960839): n is a or c or g or t.
  misc_feature (960860)..(960861): n is a or c or g or t.
  misc_feature (960872)..(960873): n is a or c or g or t.
  misc_feature (960879)..(960879): n is a or c or g or t.
  misc_feature (960890)..(960890): n is a or c or g or t.
  misc_feature (1250239)..(1250239): n is a or c or g or t.
  misc_feature (1302432)..(1302434): n is a or c or g or t.
  misc_feature (1302471)..(1302471): n is a or c or g or t.
  misc_feature (1302488)..(1302488): n is a or c or g or t.
  misc_feature (1674836)..(1674836): n is a or c or g or t.
MPRRRKFPDYVSIRVPVYQPPNSVLELLFDGKTLEIARKVVDYLKQNGGLFKDEYQEALGVDGADKVLYFRVMKKLLALGMVREDAGVYKLSDRFSERMENLAKMWKFEIGKVAELW

SEQ ID NO: 1767 - protein, 188 aa, Thermococcus kodakaraensis KOD1
  misc_feature (321437)..(321437): n is a or c or g or t.
  misc_feature (527833)..(527833): n is a or c or g or t.
  misc_feature (527901)..(527901): n is a or c or g or t.
  misc_feature (527978)..(527978): n is a or c or g or t.
  misc_feature (960838)..(960839): n is a or c or g or t.
  misc_feature (960860)..(960861): n is a or c or g or t.
  misc_feature (960872)..(960873): n is a or c or g or t.
  misc_feature (960879)..(960879): n is a or c or g or t.
  misc_feature (960890)..(960890): n is a or c or g or t.
  misc_feature (1250239)..(1250239): n is a or c or g or t.
  misc_feature (1302432)..(1302434): n is a or c or g or t.
  misc_feature (1302471)..(1302471): n is a or c or g or t.
  misc_feature (1302488)..(1302488): n is a or c or g or t.
  misc_feature (1674836)..(1674836): n is a or c or g or t.
MKAETVMKILPQIEGMRDVDFSQFNPPYPGVIDAFEKSGREGLVEFQKFVEENGLGKEVVRSFLVSLLQYLLIRYRRFNEYAVVKPVVKVFITLKGWLNENGFERDWEKLLASFVGYLVSMMPMIVENEDCETTGAYAVVIAKLAREAMEKFNDEYYDELFKAANGILDELREKCGTDVAMVEKGKGC

SEQ ID NO: 1768 - protein, 94 aa, Thermococcus kodakaraensis KOD1
  misc_feature (321437)..(321437): n is a or c or g or t.
  misc_feature (527833)..(527833): n is a or c or g or t.
  misc_feature (527901)..(527901): n is a or c or g or t.
  misc_feature (527978)..(527978): n is a or c or g or t.
  misc_feature (960838)..(960839): n is a or c or g or t.
  misc_feature (960860)..(960861): n is a or c or g or t.
  misc_feature (960872)..(960873): n is a or c or g or t.
  misc_feature (960879)..(960879): n is a or c or g or t.
  misc_feature (960890)..(960890): n is a or c or g or t.
  misc_feature (1250239)..(1250239): n is a or c or g or t.
  misc_feature (1302432)..(1302434): n is a or c or g or t.
  misc_feature (1302471)..(1302471): n is a or c or g or t.
  misc_feature (1302488)..(1302488): n is a or c or g or t.
  misc_feature (1674836)..(1674836): n is a or c or g or t.
VPEMAEEHVVYIGKKPVMNYVLAVITQFNEGAKEVSIRARGRAISRAVDVAEIVRNRFLPEVRVKEIKIGTEELPTADGRTANTSTIEIILEKP

SEQ ID NO: 1769 - protein, 185 aa, Thermococcus kodakaraensis KOD1
  misc_feature (321437)..(321437): n is a or c or g or t.
  misc_feature (527833)..(527833): n is a or c or g or t.
  misc_feature (527901)..(527901): n is a or c or g or t.
  misc_feature (527978)..(527978): n is a or c or g or t.
  misc_feature (960838)..(960839): n is a or c or g or t.
  misc_feature (960860)..(960861): n is a or c or g or t.
  misc_feature (960872)..(960873): n is a or c or g or t.
  misc_feature (960879)..(960879): n is a or c or g or t.
  misc_feature (960890)..(960890): n is a or c or g or t.
  misc_feature (1250239)..(1250239): n is a or c or g or t.
  misc_feature (1302432)..(1302434): n is a or c or g or t.
  misc_feature (1302471)..(1302471): n is a or c or g or t.
  misc_feature (1302488)..(1302488): n is a or c or g or t.
  misc_feature (1674836)..(1674836): n is a or c or g or t.
VDLLDYEVIDIHDERAKELAQILSNEKALSILKLIEERPRSISEISRELGIPISTVSYHIDRMLKVGLVEVAGKKYGKRLQEVKLYRASSKPILILPGGKKKHRTWEKLRVINLAVSAVASTGMYFAVKLLMGGSEEQSETVRTLTVKTAKEASKSSLDWIAVIIAILTFILVFGVLEYRFRKRF

SEQ ID NO: 1770 - protein, 539 aa, Thermococcus kodakaraensis KOD1
  misc_feature (321437)..(321437): n is a or c or g or t.
  misc_feature (527833)..(527833): n is a or c or g or t.
  misc_feature (527901)..(527901): n is a or c or g or t.
  misc_feature (527978)..(527978): n is a or c or g or t.
  misc_feature (960838)..(960839): n is a or c or g or t.
  misc_feature (960860)..(960861): n is a or c or g or t.
  misc_feature (960872)..(960873): n is a or c or g or t.
  misc_feature (960879)..(960879): n is a or c or g or t.
  misc_feature (960890)..(960890): n is a or c or g or t.
  misc_feature (1250239)..(1250239): n is a or c or g or t.
  misc_feature (1302432)..(1302434): n is a or c or g or t.
  misc_feature (1302471)..(1302471): n is a or c or g or t.
  misc_feature (1302488)..(1302488): n is a or c or g or t.
  misc_feature (1674836)..(1674836): n is a or c or g or t.
VEGMILGVHDGHDAGAVLIDGERIFAVNEERLNRVKKYRGFPELSIRKVLEMAGASPEDVEVIAVAGIFRKQSRLIELEENLKAIFGKDFKRKVLFVEHHLAHSASAYYTSGWRDAIALSIDAAGDGLSSSIYVARDGEMIRIAQSTYLDSLGDFYASVTELLGFKPMRHEGKVMSLAAYGKPTYDLSSIIELNGLTFENHLKVVGIEATRRLAELFKYPLKHAKEIAMQMKRGKLDGKLQKKAIEIAASAQAHLEKLVEELGLRLKGYSLPVAYAGGVAQNVKANAVLRHVFGDENIWVFPAMDDGGLAFGAAIFVKAQLERLDGKWRPFRLEHVYLGPEYSDEDIESTLREEGVQYEEISDVPGFVADALFDGKLVGLFQGRMEYGPRALGNRSILADPRDESVKEKLNVALKRDVFQPFAPSMLWEKAEEYLEDLNGRPNEFMTMSYTASEEFRGVAPAVVHVDGTTRPQAVRKEINELYYSTIAEFHKKAGIGAVLNTSFNMHGEPIVCSPADAVKTFREAKLDVLVIGKFVVSR

SEQ ID NO: 1771 - protein, 392 aa, Thermococcus kodakaraensis KOD1
  misc_feature (321437)..(321437): n is a or c or g or t.
  misc_feature (527833)..(527833): n is a or c or g or t.
  misc_feature (527901)..(527901): n is a or c or g or t.
  misc_feature (527978)..(527978): n is a or c or g or t.
  misc_feature (960838)..(960839): n is a or c or g or t.
  misc_feature (960860)..(960861): n is a or c or g or t.
  misc_feature (960872)..(960873): n is a or c or g or t.
  misc_feature (960879)..(960879): n is a or c or g or t.
  misc_feature (960890)..(960890): n is a or c or g or t.
  misc_feature (1250239)..(1250239): n is a or c or g or t.
  misc_feature (1302432)..(1302434): n is a or c or g or t.
  misc_feature (1302471)..(1302471): n is a or c or g or t.
  misc_feature (1302488)..(1302488): n is a or c or g or t.
  misc_feature (1674836)..(1674836): n is a or c or g or t.
VMVMALSDRLDLVNPSEIRKLFDLAAGMQDVISLGIGEPDFDTPEHIKGYAKEALDKGYTHYGPNAGLPMLREAVAKKLKEQNGIEADPKTEVMILTGANQAFLMGLATFLKDGEEVLIPSPMFVSYAPAVILAGGKPVEVPTYEENEFRLSVDDLEKHVTDKTRALIINTPSNPTGSVLTKKDIEEIADFAVEHDLMVISDEVYEHFVYDGVKNHSIASLDGMFERTITVNGFSKTFAMTGWRLGFVAAPAWVIEKMTRFQMYNSTCPVTFAQYAAAKALEDPRSWKAVEEMRKEYDRRRNLVWKRLNEMGLPTVKPKGAFYIFPRIRDTGLTDHQFSELMLKEARVAVVPGSAFGKAGEGYIRISYATAYEKLEEAMDRMEKVLKEKKLV

SEQ ID NO: 1772 - protein, 71 aa, Thermococcus kodakaraensis KOD1
  misc_feature (321437)..(321437): n is a or c or g or t.
  misc_feature (527833)..(527833): n is a or c or g or t.
  misc_feature (527901)..(527901): n is a or c or g or t.
  misc_feature (527978)..(527978): n is a or c or g or t.
  misc_feature (960838)..(960839): n is a or c or g or t.
  misc_feature (960860)..(960861): n is a or c or g or t.
  misc_feature (960872)..(960873): n is a or c or g or t.
  misc_feature (960879)..(960879): n is a or c or g or t.
  misc_feature (960890)..(960890): n is a or c or g or t.
  misc_feature (1250239)..(1250239): n is a or c or g or t.
  misc_feature (1302432)..(1302434): n is a or c or g or t.
  misc_feature (1302471)..(1302471): n is a or c or g or t.
  misc_feature (1302488)..(1302488): n is a or c or g or t.
  misc_feature (1674836)..(1674836): n is a or c or g or t.
MEKVKSVLERRLEVVRRRKEAVLREEARLIRLARQKRDVAMVLAKVKKEKLALMAEEAKVLRALKQSAPAV

SEQ ID NO: 1773 - protein, 170 aa, Thermococcus kodakaraensis KOD1
  misc_feature (321437)..(321437): n is a or c or g or t.
  misc_feature (527833)..(527833): n is a or c or g or t.
  misc_feature (527901)..(527901): n is a or c or g or t.
  misc_feature (527978)..(527978): n is a or c or g or t.
  misc_feature (960838)..(960839): n is a or c or g or t.
  misc_feature (960860)..(960861): n is a or c or g or t.
  misc_feature (960872)..(960873): n is a or c or g or t.
  misc_feature (960879)..(960879): n is a or c or g or t.
  misc_feature (960890)..(960890): n is a or c or g or t.
  misc_feature (1250239)..(1250239): n is a or c or g or t.
  misc_feature (1302432)..(1302434): n is a or c or g or t.
  misc_feature (1302471)..(1302471): n is a or c or g or t.
  misc_feature (1302488)..(1302488): n is a or c or g or t.
  misc_feature (1674836)..(1674836): n is a or c or g or t.
MGVKDHKEKAPRKFRFAVITVSDTASRGEKEDKSGKFLVEELEKAGHERVLYKVVPDEKMEIIGAVVDAFRAGADVVVTSGGTGISSRDVTIESLRPLFDKELSFGDIFRLVSYEEIGTAAIMTRATGGIIRSSGRAMAVFCLPGSLGAAKTGVKLILAEAGHVLKHGRE

SEQ ID NO: 1774 - protein, 396 aa, Thermococcus kodakaraensis KOD1
  misc_feature (321437)..(321437): n is a or c or g or t.
  misc_feature (527833)..(527833): n is a or c or g or t.
  misc_feature (527901)..(527901): n is a or c or g or t.
  misc_feature (527978)..(527978): n is a or c or g or t.
  misc_feature (960838)..(960839): n is a or c or g or t.
  misc_feature (960860)..(960861): n is a or c or g or t.
  misc_feature (960872)..(960873): n is a or c or g or t.
  misc_feature (960879)..(960879): n is a or c or g or t.
  misc_feature (960890)..(960890): n is a or c or g or t.
  misc_feature (1250239)..(1250239): n is a or c or g or t.
  misc_feature (1302432)..(1302434): n is a or c or g or t.
  misc_feature (1302471)..(1302471): n is a or c or g or t.
  misc_feature (1302488)..(1302488): n is a or c or g or t.
  misc_feature (1674836)..(1674836): n is a or c or g or t.
MREFKKLTPYKEALGLLLNDLSEIQEVEEVPLDEALGRVLAEDVVSPIDSPPFDRSAVDGYALRAEDTFQAREYSPVELRVIDEIPAGGESKKTVEPGTAVKLLTGAKIPEGANAVLMQEMAEREGDVIRVLRPVAPGQNVAMKGEDVRKGQVVLKKGQILRPQDLAILKSIGFKTVRVRRKPRVGIIVTGSELIEEFDEEALNHGKILESNSVMLKGLVRQYFGEPRFYGVIPDDEEKIGEAIRKARSENDLVLVTGGSAFGDMDFAHRFVNLLFHGTTIKPGRPIGYGERVFVMSGYPVAVFTQFHLYVKHALAKLVGARNYETRVRARLTERVPSQLGRYEFVKVWYENGTARPIKKKGSGIISSLVESNGYITIPEDSEGYLEGEEVEVVLY

SEQ ID NO: 1775 - protein, 180 aa, Thermococcus kodakaraensis KOD1
  misc_feature (321437)..(321437): n is a or c or g or t.
  misc_feature (527833)..(527833): n is a or c or g or t.
  misc_feature (527901)..(527901): n is a or c or g or t.
  misc_feature (527978)..(527978): n is a or c or g or t.
  misc_feature (960838)..(960839): n is a or c or g or t.
  misc_feature (960860)..(960861): n is a or c or g or t.
  misc_feature (960872)..(960873): n is a or c or g or t.
  misc_feature (960879)..(960879): n is a or c or g or t.
  misc_feature (960890)..(960890): n is a or c or g or t.
  misc_feature (1250239)..(1250239): n is a or c or g or t.
  misc_feature (1302432)..(1302434): n is a or c or g or t.
  misc_feature (1302471)..(1302471): n is a or c or g or t.
  misc_feature (1302488)..(1302488): n is a or c or g or t.
  misc_feature (1674836)..(1674836): n is a or c or g or t.
VWSMRPVVVKGKLVSLAVPTKDDVRRAWLWYNDRDVRRFLSDPDGLFFFEDELEWYEAMRRGKRENRVFTVLENSSKSPVGFVGLHRINHKDGHAELGYFIAKEYWNRGYATEAVGLALKYAFEWLNLRKVYARVYEPNTASIRVLEKNGFELVGRMKKHSHIPGYGFVDELIFEKFREE

SEQ ID NO: 1776 - protein, 478 aa, Thermococcus kodakaraensis KOD1
  misc_feature (321437)..(321437): n is a or c or g or t.
  misc_feature (527833)..(527833): n is a or c or g or t.
  misc_feature (527901)..(527901): n is a or c or g or t.
  misc_feature (527978)..(527978): n is a or c or g or t.
  misc_feature (960838)..(960839): n is a or c or g or t.
  misc_feature (960860)..(960861): n is a or c or g or t.
  misc_feature (960872)..(960873): n is a or c or g or t.
  misc_feature (960879)..(960879): n is a or c or g or t.
  misc_feature (960890)..(960890): n is a or c or g or t.
  misc_feature (1250239)..(1250239): n is a or c or g or t.
  misc_feature (1302432)..(1302434): n is a or c or g or t.
  misc_feature (1302471)..(1302471): n is a or c or g or t.
  misc_feature (1302488)..(1302488): n is a or c or g or t.
  misc_feature (1674836)..(1674836): n is a or c or g or t.
MRLPGQKTKIIATLGPASLNEKTITAMVRAGMSVARINFAHGDLKQHEKSIKLVRKVSERLNRPVAILGDLPGVKIRVGEIEGGSVTLRRWQTVTLTTRDVIGNEAVIPVEFKDFPRLVSKGDVIYLSDGFIALRVEDVRDQDVICKVLVGGTLFSRKGINIPKARLAIEAITEKDLEFLEFSLEHGVDAVGISFVGSAYDVLKARRFVEERNGKLFLIAKIERPDAVRNFDEILRAADGVMVARGDLGVEMPIEKLPILQKKLIQKANCAGKPVITATQMLESMTHEKLPTRAEVTDVANAILDGTDAVMLSEETAVGKYPVETVKMMARIAKTTEAYRDSKWAERTVEWKMSELRGTRPTKGTIKDAITRSIIEALNSIDIKYILTPTRMGQTARLIARFKPKQWVLAFVTDEWVKNTLMFSYGVYPFLVEDTSEEEILRVITGLGLVDEGDTVLLTKGTPIGKTAGTNTIRIFNV

SEQ ID NO: 1777 - protein, 391 aa, Thermococcus kodakaraensis KOD1
  misc_feature (321437)..(321437): n is a or c or g or t.
  misc_feature (527833)..(527833): n is a or c or g or t.
  misc_feature (527901)..(527901): n is a or c or g or t.
  misc_feature (527978)..(527978): n is a or c or g or t.
  misc_feature (960838)..(960839): n is a or c or g or t.
  misc_feature (960860)..(960861): n is a or c or g or t.
  misc_feature (960872)..(960873): n is a or c or g or t.
  misc_feature (960879)..(960879): n is a or c or g or t.
  misc_feature (960890)..(960890): n is a or c or g or t.
  misc_feature (1250239)..(1250239): n is a or c or g or t.
  misc_feature (1302432)..(1302434): n is a or c or g or t.
  misc_feature (1302471)..(1302471): n is a or c or g or t.
  misc_feature (1302488)..(1302488): n is a or c or g or t.
  misc_feature (1674836)..(1674836): n is a or c or g or t.
MSTSTRVAAEKNVDFPTFGFPTRPISMFSTTSPNSPLAFKSFRPKTIISSFTILYQLSVPLNGGREMKKQEESKITAIAYSKDKFVSRKLSNLEEALGFQDYRVVWINVDGLSLGEQLRDVFKIHERPIRALQRQTSRVRVFVFPEYLFLIVHQVYESEGGLKRERVGIILRDNFLITIQEIPGDVFDPIREGIREGEGLFREQGADYLLFALLEAIVENYVPIIEAISSKIEGLENEILSRSDTRTLRKIHRIRQDILFMRRTVFPLLEAFRRLEIEGSRFFSEGTRPFLDELHDHVREVLEILEGQRELANSLIDLYYSTISMRTNDIIRILTVVSTIFIPLTFITGLYGMNFRYMPELQWRYGYPAVLTTMLVIAVGMLLYFRRKGWI

SEQ ID NO: 1778 - protein, 249 aa, Thermococcus kodakaraensis KOD1
  misc_feature (321437)..(321437): n is a or c or g or t.
  misc_feature (527833)..(527833): n is a or c or g or t.
  misc_feature (527901)..(527901): n is a or c or g or t.
  misc_feature (527978)..(527978): n is a or c or g or t.
  misc_feature (960838)..(960839): n is a or c or g or t.
  misc_feature (960860)..(960861): n is a or c or g or t.
  misc_feature (960872)..(960873): n is a or c or g or t.
  misc_feature (960879)..(960879): n is a or c or g or t.
  misc_feature (960890)..(960890): n is a or c or g or t.
  misc_feature (1250239)..(1250239): n is a or c or g or t.
  misc_feature (1302432)..(1302434): n is a or c or g or t.
  misc_feature (1302471)..(1302471): n is a or c or g or t.
  misc_feature (1302488)..(1302488): n is a or c or g or t.
  misc_feature (1674836)..(1674836): n is a or c or g or t.
VLVEGMVTFIPFGEKPNRDGVLYTLQLLKRNKLIDDYVIVEASRIDLLSERIPQDRAYVVGEHLATYGIIDRLRPKSLISVDAHTDLMHDYLDHGSWLAYALENRLVERAAVMAPVLMIPTTDRTQLWTRRVKIYPALLRSRKRGGKWRAYKNFQTNSIEDIIADAKKYLGDEIYLTVDMDVLRPEYKIARFQHGELTLDELIEILEAIKREFNVVAFDIAEISDRIRHSRLGKRALFEVFQLLTEGLE

SEQ ID NO: 1779 - protein, 97 aa, Thermococcus kodakaraensis KOD1
  misc_feature (321437)..(321437): n is a or c or g or t.
  misc_feature (527833)..(527833): n is a or c or g or t.
  misc_feature (527901)..(527901): n is a or c or g or t.
  misc_feature (527978)..(527978): n is a or c or g or t.
  misc_feature (960838)..(960839): n is a or c or g or t.
  misc_feature (960860)..(960861): n is a or c or g or t.
  misc_feature (960872)..(960873): n is a or c or g or t.
  misc_feature (960879)..(960879): n is a or c or g or t.
  misc_feature (960890)..(960890): n is a or c or g or t.
  misc_feature (1250239)..(1250239): n is a or c or g or t.
  misc_feature (1302432)..(1302434): n is a or c or g or t.
  misc_feature (1302471)..(1302471): n is a or c or g or t.
  misc_feature (1302488)..(1302488): n is a or c or g or t.
  misc_feature (1674836)..(1674836): n is a or c or g or t.
MVSEGRFIGSDDLLFLVVNMVDVFELARRYHDELGVKEPSLATMAAEMFEDLGLQMADFLKQNGYSIVSTKFIDYDKSLVMEITKGDRSFEIILRKS

SEQ ID NO: 1780 - protein, 399 aa, Thermococcus kodakaraensis KOD1
  misc_feature (321437)..(321437): n is a or c or g or t.
  misc_feature (527833)..(527833): n is a or c or g or t.
  misc_feature (527901)..(527901): n is a or c or g or t.
  misc_feature (527978)..(527978): n is a or c or g or t.
  misc_feature (960838)..(960839): n is a or c or g or t.
  misc_feature (960860)..(960861): n is a or c or g or t.
  misc_feature (960872)..(960873): n is a or c or g or t.
  misc_feature (960879)..(960879): n is a or c or g or t.
  misc_feature (960890)..(960890): n is a or c or g or t.
  misc_feature (1250239)..(1250239): n is a or c or g or t.
  misc_feature (1302432)..(1302434): n is a or c or g or t.
  misc_feature (1302471)..(1302471): n is a or c or g or t.
  misc_feature (1302488)..(1302488): n is a or c or g or t.
  misc_feature (1674836)..(1674836): n is a or c or g or t.
MMLPNSGILMANPSMAKKRTPEAIKKNLLSLLNEKEDPRAPICEICGRRHARIKPVYRSDFPLVGTGGVPNYFPSGKDGANICSHCLFLAQMMPLVAYRLSRVLIIHAYPYQLMLEFHKEAIEDIKKSELASTARDFKRPENFLFEKLTEIGTKFEIGKLENASITLYYFVNNNQSQEMEVIYIPNPVLRFVAFAARVDRAGWKKIVSMGWNKGCAKRLSKKPEEIPKSCSNDVYSKLLSGGSILPYFIDFQNRKVNASWRLLSFYCSEVLGLDREALEFIKGIADRIVETVEKLPDNKLSRRIRELERAEKLYQFESFFIRVEKDRQELGIPEALMSFDDFARILTSYGEDLNVSWKTVKNLLLFRIYEKLHDRLMKASAEEVEAEENEEEFEEGGEE

SEQ ID NO: 1781 - protein, 170 aa, Thermococcus kodakaraensis KOD1
  misc_feature (321437)..(321437): n is a or c or g or t.
  misc_feature (527833)..(527833): n is a or c or g or t.
  misc_feature (527901)..(527901): n is a or c or g or t.
  misc_feature (527978)..(527978): n is a or c or g or t.
  misc_feature (960838)..(960839): n is a or c or g or t.
  misc_feature (960860)..(960861): n is a or c or g or t.
  misc_feature (960872)..(960873): n is a or c or g or t.
  misc_feature (960879)..(960879): n is a or c or g or t.
  misc_feature (960890)..(960890): n is a or c or g or t.
  misc_feature (1250239)..(1250239): n is a or c or g or t.
  misc_feature (1302432)..(1302434): n is a or c or g or t.
  misc_feature (1302471)..(1302471): n is a or c or g or t.
  misc_feature (1302488)..(1302488): n is a or c or g or t.
  misc_feature (1674836)..(1674836): n is a or c or g or t.
VEDKYSLDELLIGGTEVNYLFICPTKLWYFSRGITMEQENEWVDLGKFLHERRYASEEKEVQIGSIKIDFIRKKDYIEVHEVKLGKSMEKAHEMQALYYLYYLKRLGIEAKAVLHYPKLNETKVITLDGREEEVEAAIGEVQRIKSLQAPPEPVKSKRCKKCAYYELCWV

SEQ ID NO: 1782 - protein, 400 aa, Thermococcus kodakaraensis KOD1
  misc_feature (321437)..(321437): n is a or c or g or t.
  misc_feature (527833)..(527833): n is a or c or g or t.
  misc_feature (527901)..(527901): n is a or c or g or t.
  misc_feature (527978)..(527978): n is a or c or g or t.
  misc_feature (960838)..(960839): n is a or c or g or t.
  misc_feature (960860)..(960861): n is a or c or g or t.
  misc_feature (960872)..(960873): n is a or c or g or t.
  misc_feature (960879)..(960879): n is a or c or g or t.
  misc_feature (960890)..(960890): n is a or c or g or t.
  misc_feature (1250239)..(1250239): n is a or c or g or t.
  misc_feature (1302432)..(1302434): n is a or c or g or t.
  misc_feature (1302471)..(1302471): n is a or c or g or t.
  misc_feature (1302488)..(1302488): n is a or c or g or t.
  misc_feature (1674836)..(1674836): n is a or c or g or t.
VMFLSVGVRFEANVEALNMVETAGNYGKHRRVPYLVEEDGKLKTVYVPAMSGESLAHAYQEHLVREALSAGLPVCDDCQRGEFYKSMDEVHFAPKLFNREEVFESVLANLSEVVDITISVLSSEIEKERNKKKQNEDKIKELEKFRGFMENLVKSEKPRDYILKNLSLASQVFGNYVIKKGILDLPPVKIEDIIVKSCVVEDVGGFLYTGSAPIRRSSAFQVSYALPVKSVALFATSEPQLHARHAQMDASSKKGNASEQMIYYVETGTALYGFTFNLDLDAIGVSAITSKPILDENEIKKRREASLKALFRMLSSSQFGAKLSRFFPVGGITELIVAVTDHPFVVTSPIYDDYIEKTQRRLKVLKSFGEESFLVVAGEEKVPEEALKEAIDYLHEKEAF

SEQ ID NO: 1783 - protein, 316 aa, Thermococcus kodakaraensis KOD1
  misc_feature (321437)..(321437): n is a or c or g or t.
  misc_feature (527833)..(527833): n is a or c or g or t.
  misc_feature (527901)..(527901): n is a or c or g or t.
  misc_feature (527978)..(527978): n is a or c or g or t.
  misc_feature (960838)..(960839): n is a or c or g or t.
  misc_feature (960860)..(960861): n is a or c or g or t.
  misc_feature (960872)..(960873): n is a or c or g or t.
  misc_feature (960879)..(960879): n is a or c or g or t.
  misc_feature (960890)..(960890): n is a or c or g or t.
  misc_feature (1250239)..(1250239): n is a or c or g or t.
  misc_feature (1302432)..(1302434): n is a or c or g or t.
  misc_feature (1302471)..(1302471): n is a or c or g or t.
  misc_feature (1302488)..(1302488): n is a or c or g or t.
  misc_feature (1674836)..(1674836): n is a or c or g or t.
VRFLTPVLFIILWGEVMKSRFDVLLEDLGGRFTKDDVPKIRDAVLALRQVMELPVSYLNPSSGYHPVVVFKKRFGRVVKEVPVSLLELKILNRYNMPGWKRVVEFWLDNDIAVHESLLGVDAVLIGDPRTLNRMGDALRRIAQYMSVRPRKLVLFYSSVYLDYGGGRYILVTLRGNDIELGLIRMKLSEAASYLGKAVEYMDSAFGNKNIEFYKVLFTYATSTYGSFDWFFHKYVYPNLNPEQREFFEEMQDYRNFLRLLYSHVNRLNKDRLGDFVGIRVVRRGNPHRPLEIEIAFTNRGIQIGRYVRTAHISFMV

SEQ ID NO: 1784 - protein, 150 aa, Thermococcus kodakaraensis KOD1
  misc_feature (321437)..(321437): n is a or c or g or t.
  misc_feature (527833)..(527833): n is a or c or g or t.
  misc_feature (527901)..(527901): n is a or c or g or t.
  misc_feature (527978)..(527978): n is a or c or g or t.
  misc_feature (960838)..(960839): n is a or c or g or t.
  misc_feature (960860)..(960861): n is a or c or g or t.
  misc_feature (960872)..(960873): n is a or c or g or t.
  misc_feature (960879)..(960879): n is a or c or g or t.
  misc_feature (960890)..(960890): n is a or c or g or t.
  misc_feature (1250239)..(1250239): n is a or c or g or t.
  misc_feature (1302432)..(1302434): n is a or c or g or t.
  misc_feature (1302471)..(1302471): n is a or c or g or t.
  misc_feature (1302488)..(1302488): n is a or c or g or t.
  misc_feature (1674836)..(1674836): n is a or c or g or t.
MGFQWGEVGISLPNRTGLKLFAVLFLASIPLSIYGRSIPEMRSYYPVFPYSSAFDFVLGELAMGITMLAHEAFYRGFLLFPLAKKNEWLAVILQDIPYTIVHIGKPGIEVPYAFIAGIVFAKMDLKGESFVPSFLLHWLGSAFFDVLCAL

SEQ ID NO: 1785 - protein, 219 aa, Thermococcus kodakaraensis KOD1
  misc_feature (321437)..(321437): n is a or c or g or t.
  misc_feature (527833)..(527833): n is a or c or g or t.
  misc_feature (527901)..(527901): n is a or c or g or t.
  misc_feature (527978)..(527978): n is a or c or g or t.
  misc_feature (960838)..(960839): n is a or c or g or t.
  misc_feature (960860)..(960861): n is a or c or g or t.
  misc_feature (960872)..(960873): n is a or c or g or t.
  misc_feature (960879)..(960879): n is a or c or g or t.
  misc_feature (960890)..(960890): n is a or c or g or t.
  misc_feature (1250239)..(1250239): n is a or c or g or t.
  misc_feature (1302432)..(1302434): n is a or c or g or t.
  misc_feature (1302471)..(1302471): n is a or c or g or t.
  misc_feature (1302488)..(1302488): n is a or c or g or t.
  misc_feature (1674836)..(1674836): n is a or c or g or t.
VRPIYRGKTKDVYEDGPYLVFYFKDSVLGEDGREDTGGNEIVGERRGKGSIVLDETEFFFRLLEEKGIRTHFVERIDERRARFLRAERIPLEVIYRELAYGSFLRRYQGWVKELKPLGIVEFTLKDDSLKDPLITEEAVVKLGIASEGEVREMKEKTRKVAEILREFFSSKGLQLVDFKLEFGRRNGELIVIDELSGDTMRVIKDGKLLSQEELREVIK

SEQ ID NO: 1786 - protein, 616 aa, Thermococcus kodakaraensis KOD1
  misc_feature (321437)..(321437): n is a or c or g or t.
  misc_feature (527833)..(527833): n is a or c or g or t.
  misc_feature (527901)..(527901): n is a or c or g or t.
  misc_feature (527978)..(527978): n is a or c or g or t.
  misc_feature (960838)..(960839): n is a or c or g or t.
  misc_feature (960860)..(960861): n is a or c or g or t.
  misc_feature (960872)..(960873): n is a or c or g or t.
  misc_feature (960879)..(960879): n is a or c or g or t.
  misc_feature (960890)..(960890): n is a or c or g or t.
  misc_feature (1250239)..(1250239): n is a or c or g or t.
  misc_feature (1302432)..(1302434): n is a or c or g or t.
  misc_feature (1302471)..(1302471): n is a or c or g or t.
  misc_feature (1302488)..(1302488): n is a or c or g or t.
  misc_feature (1674836)..(1674836): n is a or c or g or t.
MEDPYIWMENLQDERVLKLVEEENRRFREFIGKLSDELFPEVWGLYSLPTLHSARLTEKGIIAVFKERDRQVIRWLNGDVIVDSKALEAEIGDEVLLQGFTADGKGKRLAYSFSIGGADEGVTRIIDLESGELIDELRPSVWNVTFLENGYYFSRFYRHGETPDGVKAPAVRLFWKDESGERMVFGQGLGSGYFMGLRKSTDGKWAMLTVTFGWNRADIYIGPIEAPDRWEKVYSADVPAEPIDVVNGRLYILTREGKGLGKVIAIEGEKTIEVVPEGEFPLEWAVIVGDRILAGRLVHASHRLEVYSLNGEKLDEIAFDLPGSVYPLDSDGKKALLRYESFTVPYRLYQFDGELKLIGTQEVEGKFTVEEDFATSKDGTKIHYFHVKGEKDDKKVWVFGYGGFNISLTPRFFPQAIPFIRRGGTFAMANLRGGSEYGEEWHRAGMRENKQNVFDDFIAVLEKLKKEGYRIAAWGRSNGGLLVSATLTQRPDVMDAALIGYPVIDMLRFHKLYIGSVWIPEYGNPDDPKDREFLLKYSPYHNVDPNKRYPPTLIYTGLHDDRVHPAHALKFFMKLREVGAPVYLRVETKSGHMGASPETRARELTDLLAFVVKTLR

SEQ ID NO: 1787 - protein, 242 aa, Thermococcus kodakaraensis KOD1
  misc_feature (321437)..(321437): n is a or c or g or t.
  misc_feature (527833)..(527833): n is a or c or g or t.
  misc_feature (527901)..(527901): n is a or c or g or t.
  misc_feature (527978)..(527978): n is a or c or g or t.
  misc_feature (960838)..(960839): n is a or c or g or t.
  misc_feature (960860)..(960861): n is a or c or g or t.
  misc_feature (960872)..(960873): n is a or c or g or t.
  misc_feature (960879)..(960879): n is a or c or g or t.
  misc_feature (960890)..(960890): n is a or c or g or t.
  misc_feature (1250239)..(1250239): n is a or c or g or t.
  misc_feature (1302432)..(1302434): n is a or c or g or t.
  misc_feature (1302471)..(1302471): n is a or c or g or t.
  misc_feature (1302488)..(1302488): n is a or c or g or t.
  misc_feature (1674836)..(1674836): n is a or c or g or t.
MGVEKVPKYDIPTKKVDYVFIELDKMKPHEQLVQKELEAFIESVTGSGIFWKPMLLAKVPGEDMYLIVDGHHRWAGLQKLGAKRAPSVILDYFSDDVKVYTWYPAFKGDLNEVVERLKKEGLEVIEDPEAEEKAERGEIAFALVGEKSFAIPGGLEEQKKVSKVLDEMSVEGKIELIYYGLKEDAREDMAKGEIDYVFIRKAPTKEEVMELVKRGEVYSPKTTRHVLPFNPDKIDVKLEELF

SEQ ID NO: 1788 - protein, 146 aa, Thermococcus kodakaraensis KOD1
  misc_feature (321437)..(321437): n is a or c or g or t.
  misc_feature (527833)..(527833): n is a or c or g or t.
  misc_feature (527901)..(527901): n is a or c or g or t.
  misc_feature (527978)..(527978): n is a or c or g or t.
  misc_feature (960838)..(960839): n is a or c or g or t.
  misc_feature (960860)..(960861): n is a or c or g or t.
  misc_feature (960872)..(960873): n is a or c or g or t.
  misc_feature (960879)..(960879): n is a or c or g or t.
  misc_feature (960890)..(960890): n is a or c or g or t.
  misc_feature (1250239)..(1250239): n is a or c or g or t.
  misc_feature (1302432)..(1302434): n is a or c or g or t.
  misc_feature (1302471)..(1302471): n is a or c or g or t.
  misc_feature (1302488)..(1302488): n is a or c or g or t.
  misc_feature (1674836)..(1674836): n is a or c or g or t.
MFSVFKHRALLSNEDASSPGEKYHFRIVQSIRDIPEKRAVVIGRAGTEVPRRWKLIPVSSVKGYFGPRELHRILEGIVEHLKHNPDVPVIIDCLEYLTVYNGFESVLKFLHLVRDYAILTSGRVYLVTDPMAWDPKQMALLRGLEA

SEQ ID NO: 1789 - protein, 142 aa, Thermococcus kodakaraensis KOD1
  misc_feature (321437)..(321437): n is a or c or g or t.
  misc_feature (527833)..(527833): n is a or c or g or t.
  misc_feature (527901)..(527901): n is a or c or g or t.
  misc_feature (527978)..(527978): n is a or c or g or t.
  misc_feature (960838)..(960839): n is a or c or g or t.
  misc_feature (960860)..(960861): n is a or c or g or t.
  misc_feature (960872)..(960873): n is a or c or g or t.
  misc_feature (960879)..(960879): n is a or c or g or t.
  misc_feature (960890)..(960890): n is a or c or g or t.
  misc_feature (1250239)..(1250239): n is a or c or g or t.
  misc_feature (1302432)..(1302434): n is a or c or g or t.
  misc_feature (1302471)..(1302471): n is a or c or g or t.
  misc_feature (1302488)..(1302488): n is a or c or g or t.
  misc_feature (1674836)..(1674836): n is a or c or g or t.
MFLGRYPFREQGGLWMAEAVDYTYFLKKIEEIERELKEIKLELQNPKKLIHFIPRVIEIRGEFGGYKLRKPLTLNVEREAGTWCVENRELEVYGCGPTLNDALHDAEKVFEALIEEYVLEDEEILDESAKELRKALLQLVEV

SEQ ID NO: 1790 - protein, 381 aa, Thermococcus kodakaraensis KOD1
  misc_feature (321437)..(321437): n is a or c or g or t.
  misc_feature (527833)..(527833): n is a or c or g or t.
  misc_feature (527901)..(527901): n is a or c or g or t.
  misc_feature (527978)..(527978): n is a or c or g or t.
  misc_feature (960838)..(960839): n is a or c or g or t.
  misc_feature (960860)..(960861): n is a or c or g or t.
  misc_feature (960872)..(960873): n is a or c or g or t.
  misc_feature (960879)..(960879): n is a or c or g or t.
  misc_feature (960890)..(960890): n is a or c or g or t.
  misc_feature (1250239)..(1250239): n is a or c or g or t.
  misc_feature (1302432)..(1302434): n is a or c or g or t.
  misc_feature (1302471)..(1302471): n is a or c or g or t.
  misc_feature (1302488)..(1302488): n is a or c or g or t.
  misc_feature (1674836)..(1674836): n is a or c or g or t.
MFNVVIVRYGEIGTKSRQTRRWFENILMNNIREALVSEGIDFKKVEAKHGRVLVRTNRAREATEVLTRVFGIVSLSPAMEVDAELEKINKTALKLFRKKKRELNLEKPKFRVTARRITKEFPLKSPEIQAKVGEYILENEESEVNLHEYDIEVGVELMEGKAYIFVDKIRAWGGLPIGTQGKVVALLSGGIDSPVAAFLMMKRGVEVIPVHIYMGEKTLEKVRKIWNQLKKYHYGGKAELIVVKPQNREEMLKKIKELGKEKYTCVLCKFMMVKHADRIAKEFGAKGIVMGDSLGQVASQTLENMYIVSQASDLPIYRPLIGLDKEEIVDIAKKIGTFELSTLPEDEIPFIPKHPVIRGSWEEFRKIYMAIFGEEPRKRDC

SEQ ID NO: 1791 - protein, 142 aa, Thermococcus kodakaraensis KOD1
  misc_feature (321437)..(321437): n is a or c or g or t.
  misc_feature (527833)..(527833): n is a or c or g or t.
  misc_feature (527901)..(527901): n is a or c or g or t.
  misc_feature (527978)..(527978): n is a or c or g or t.
  misc_feature (960838)..(960839): n is a or c or g or t.
  misc_feature (960860)..(960861): n is a or c or g or t.
  misc_feature (960872)..(960873): n is a or c or g or t.
  misc_feature (960879)..(960879): n is a or c or g or t.
  misc_feature (960890)..(960890): n is a or c or g or t.
  misc_feature (1250239)..(1250239): n is a or c or g or t.
  misc_feature (1302432)..(1302434): n is a or c or g or t.
  misc_feature (1302471)..(1302471): n is a or c or g or t.
  misc_feature (1302488)..(1302488): n is a or c or g or t.
  misc_feature (1674836)..(1674836): n is a or c or g or t.
MRKWEHYEHTADIGVRGYGSTLEEAFEAVALGLFDVMVNVKKVEPKECREVEVEEEDLEALLYSFLEELLVLHDMEGLVFGDVKVRIEKTENGYKLKAKACGEVLNPEKHEPKEEVKAITYHDMKIEKLPDGRWMAQFVPDL

SEQ ID NO: 1792 - protein, 312 aa, Thermococcus kodakaraensis KOD1
  misc_feature (321437)..(321437): n is a or c or g or t.
  misc_feature (527833)..(527833): n is a or c or g or t.
  misc_feature (527901)..(527901): n is a or c or g or t.
  misc_feature (527978)..(527978): n is a or c or g or t.
  misc_feature (960838)..(960839): n is a or c or g or t.
  misc_feature (960860)..(960861): n is a or c or g or t.
  misc_feature (960872)..(960873): n is a or c or g or t.
  misc_feature (960879)..(960879): n is a or c or g or t.
  misc_feature (960890)..(960890): n is a or c or g or t.
  misc_feature (1250239)..(1250239): n is a or c or g or t.
  misc_feature (1302432)..(1302434): n is a or c or g or t.
  misc_feature (1302471)..(1302471): n is a or c or g or t.
  misc_feature (1302488)..(1302488): n is a or c or g or t.
  misc_feature (1674836)..(1674836): n is a or c or g or t.
MSARDVVKEANPAFYERYSKLEDSDEFWEFLIRPLRQSIRVNTLKAPLEVIVERLKEEFELEPIPWVREGFFINVDNLARVPEHGLGLVFGQEASSMIPPVVLDPKPGELVLDMAAAPGSKTGQIAQYMQNEGCIIANDPNRDRANVLIANLNRMGVLIARVTTRDGASFARFENTFDRVLLDAPCSSVGMIRKSWRFLREWREKAVVKYMNVQKRLILAGYRALKPGGVMVYSTCTIDPLENEEVVDYLLRKTDARLERIDLPVKTSEPVLEWEGKEYSEELKKALRIHPNDNDTEAFFIAKIVKPGDGGE

SEQ ID NO: 1793 - protein, 482 aa, Thermococcus kodakaraensis KOD1
  misc_feature (321437)..(321437): n is a or c or g or t.
  misc_feature (527833)..(527833): n is a or c or g or t.
  misc_feature (527901)..(527901): n is a or c or g or t.
  misc_feature (527978)..(527978): n is a or c or g or t.
  misc_feature (960838)..(960839): n is a or c or g or t.
  misc_feature (960860)..(960861): n is a or c or g or t.
  misc_feature (960872)..(960873): n is a or c or g or t.
  misc_feature (960879)..(960879): n is a or c or g or t.
  misc_feature (960890)..(960890): n is a or c or g or t.
  misc_feature (1250239)..(1250239): n is a or c or g or t.
  misc_feature (1302432)..(1302434): n is a or c or g or t.
  misc_feature (1302471)..(1302471): n is a or c or g or t.
  misc_feature (1302488)..(1302488): n is a or c or g or t.
  misc_feature (1674836)..(1674836): n is a or c or g or t.
VREMVPLKRIDKIRWEIPKFDKRMRVPGRVYADDQLIEKMKQDRTLEQAANVAMLPGIYKYSIVMPDGHQGYGFPIGGVAAFDAKEGVISPGGVGYDINCGVRLIRTNLTKDEVRPKIKELVDTLFKNVPSGLGSKGRVRLHWTQLDDVLADGAKWAVDNGYGWERDLEHLEEGGRMEGADPDAVSQKAKQRGAPQLGSLGSGNHFLEVQYVDKVYNEEIAKAYGLFEGQVVVMVHTGSRGLGHQVASDYLRIMEKANRKYGVPWPDRELVSVPFQSEEGQQYFSAMKAAANFAWANRQMITHWVRESFEEVFKRKAEDMEMEIVYDVAHNIAKLEEHEVDGKKVKVVVHRKGATRAFPAGHPDVPRAYRDVGQPVLIPGSMGTASYVLAGAEGSMRETFGSSCHGAGRLLSRKAATRQYRGDRLRNELLQRGIYVRAASLRVVAEEAPGAYKSVDNVVQVVHEAGIANLVARMRPMGVAKG

SEQ ID NO: 1794 - protein, 175 aa, Thermococcus kodakaraensis KOD1
  misc_feature (321437)..(321437): n is a or c or g or t.
  misc_feature (527833)..(527833): n is a or c or g or t.
  misc_feature (527901)..(527901): n is a or c or g or t.
  misc_feature (527978)..(527978): n is a or c or g or t.
  misc_feature (960838)..(960839): n is a or c or g or t.
  misc_feature (960860)..(960861): n is a or c or g or t.
  misc_feature (960872)..(960873): n is a or c or g or t.
  misc_feature (960879)..(960879): n is a or c or g or t.
  misc_feature (960890)..(960890): n is a or c or g or t.
  misc_feature (1250239)..(1250239): n is a or c or g or t.
  misc_feature (1302432)..(1302434): n is a or c or g or t.
  misc_feature (1302471)..(1302471): n is a or c or g or t.
  misc_feature (1302488)..(1302488): n is a or c or g or t.
  misc_feature (1674836)..(1674836): n is a or c or g or t.
VWLRVRVLNFALPLEMGIEMKDLTHVDEKGVKMVEVGHKDVVFRKAVAKGRIRLKPETIELIKAGKTKKGNVIAAAQIAGILAVKKTPELIPLCHPIPLTGVDITFEFGDDYIEATCEVRAYYKTGVEMEALTGVSVALLTIWDMVKAVEKDENGQYPFTRIEDIRVVEKVKGEE

SEQ ID NO: 1795 - protein, 297 aa, Thermococcus kodakaraensis KOD1
  misc_feature (321437)..(321437): n is a or c or g or t.
  misc_feature (527833)..(527833): n is a or c or g or t.
  misc_feature (527901)..(527901): n is a or c or g or t.
  misc_feature (527978)..(527978): n is a or c or g or t.
  misc_feature (960838)..(960839): n is a or c or g or t.
  misc_feature (960860)..(960861): n is a or c or g or t.
  misc_feature (960872)..(960873): n is a or c or g or t.
  misc_feature (960879)..(960879): n is a or c or g or t.
  misc_feature (960890)..(960890): n is a or c or g or t.
  misc_feature (1250239)..(1250239): n is a or c or g or t.
  misc_feature (1302432)..(1302434): n is a or c or g or t.
  misc_feature (1302471)..(1302471): n is a or c or g or t.
  misc_feature (1302488)..(1302488): n is a or c or g or t.
  misc_feature (1674836)..(1674836): n is a or c or g or t.
VGNDPKGYKEEPSKARPMAVDIRKTAHEMVKNGTWKLKGDTFYQALRLKSGVVGIVAYNGDFLFPETWGRKEKKEAREKLSFILGLDTDLDSFYSEISDSPFSFLVEEFKGLTVPAAPSPYQALVEVIAQQQVNFEFAQRTIRNLVEMAGEKAGNIYVFPTAEKIASLSPDELKRAKLGYRAEYIKHVTELYLKGELKLDLWEMDEKEAIKYLTAFRGIGKWTAELFLAYGLRKNTYPAGDLGLRRGIAKIFGKSVKEVKEKDVREILEPYGKWKGLLAFYITCYDRKTELERRRIK

SEQ ID NO: 1796 - protein, 106 aa, Thermococcus kodakaraensis KOD1
  misc_feature (321437)..(321437): n is a or c or g or t.
  misc_feature (527833)..(527833): n is a or c or g or t.
  misc_feature (527901)..(527901): n is a or c or g or t.
  misc_feature (527978)..(527978): n is a or c or g or t.
  misc_feature (960838)..(960839): n is a or c or g or t.
  misc_feature (960860)..(960861): n is a or c or g or t.
  misc_feature (960872)..(960873): n is a or c or g or t.
  misc_feature (960879)..(960879): n is a or c or g or t.
  misc_feature (960890)..(960890): n is a or c or g or t.
  misc_feature (1250239)..(1250239): n is a or c or g or t.
  misc_feature (1302432)..(1302434): n is a or c or g or t.
  misc_feature (1302471)..(1302471): n is a or c or g or t.
  misc_feature (1302488)..(1302488): n is a or c or g or t.
  misc_feature (1674836)..(1674836): n is a or c or g or t.
VSEEIVISLPKGKFKALKGRDIEELIRENLPKAEETLKAEREEHLREKIKKLEEKLSEIEGQLDELREFYEKAKADKEKFLTVRNELREENERLRRELEEKKVHKT

SEQ ID NO: 1797 - protein, 95 aa, Thermococcus kodakaraensis KOD1
  misc_feature (321437)..(321437): n is a or c or g or t.
  misc_feature (527833)..(527833): n is a or c or g or t.
  misc_feature (527901)..(527901): n is a or c or g or t.
  misc_feature (527978)..(527978): n is a or c or g or t.
  misc_feature (960838)..(960839): n is a or c or g or t.
  misc_feature (960860)..(960861): n is a or c or g or t.
  misc_feature (960872)..(960873): n is a or c or g or t.
  misc_feature (960879)..(960879): n is a or c or g or t.
  misc_feature (960890)..(960890): n is a or c or g or t.
  misc_feature (1250239)..(1250239): n is a or c or g or t.
  misc_feature (1302432)..(1302434): n is a or c or g or t.
  misc_feature (1302471)..(1302471): n is a or c or g or t.
  misc_feature (1302488)..(1302488): n is a or c or g or t.
  misc_feature (1674836)..(1674836): n is a or c or g or t.
MASYLAMFHAARAVLFRDGWREKSHYCVARYLEEFYVKTGKLEGYWVELLDRMRELRHEDQYDVSYTPEPDEVKDALKVAEKFIEVIKSLIGEEQ

SEQ ID NO: 1798 - protein, 199 aa, Thermococcus kodakaraensis KOD1
  misc_feature (321437)..(321437): n is a or c or g or t.
  misc_feature (527833)..(527833): n is a or c or g or t.
  misc_feature (527901)..(527901): n is a or c or g or t.
  misc_feature (527978)..(527978): n is a or c or g or t.
  misc_feature (960838)..(960839): n is a or c or g or t.
  misc_feature (960860)..(960861): n is a or c or g or t.
  misc_feature (960872)..(960873): n is a or c or g or t.
  misc_feature (960879)..(960879): n is a or c or g or t.
  misc_feature (960890)..(960890): n is a or c or g or t.
  misc_feature (1250239)..(1250239): n is a or c or g or t.
  misc_feature (1302432)..(1302434): n is a or c or g or t.
  misc_feature (1302471)..(1302471): n is a or c or g or t.
  misc_feature (1302488)..(1302488): n is a or c or g or t.
  misc_feature (1674836)..(1674836): n is a or c or g or t.
MTYPMSAEPVRGVILNSYGGVIMIIAVTGTPGVGKTTISKLLAEKLGYEYVNLRDYALEKGIGEMKENELEIDVDELREAFGRDFKGKNVVADGHLSHFLKADLVIVLRANPKLIAERLKERGYGREKLGENVEAELVDVILVEALEENENVIEVDTTGKTPEEVVEEILNLIRRGVKRRVGIVDWSEVYDEVLPYLRL

SEQ ID NO: 1799 - protein, 102 aa, Thermococcus kodakaraensis KOD1
  misc_feature (321437)..(321437): n is a or c or g or t.
  misc_feature (527833)..(527833): n is a or c or g or t.
  misc_feature (527901)..(527901): n is a or c or g or t.
  misc_feature (527978)..(527978): n is a or c or g or t.
  misc_feature (960838)..(960839): n is a or c or g or t.
  misc_feature (960860)..(960861): n is a or c or g or t.
  misc_feature (960872)..(960873): n is a or c or g or t.
  misc_feature (960879)..(960879): n is a or c or g or t.
  misc_feature (960890)..(960890): n is a or c or g or t.
  misc_feature (1250239)..(1250239): n is a or c or g or t.
  misc_feature (1302432)..(1302434): n is a or c or g or t.
  misc_feature (1302471)..(1302471): n is a or c or g or t.
  misc_feature (1302488)..(1302488): n is a or c or g or t.
  misc_feature (1674836)..(1674836): n is a or c or g or t.
MQKARIKLASTNIKALNEVTDQIKQIAERTGVRMSGPIPLPTKRIRITTRKSPDGEGSATFDRFELRVHKRLVDIEADERAMRQIMRIRVPEDVTIEIELIS

SEQ ID NO: 1800 - protein, 442 aa, Thermococcus kodakaraensis KOD1
  misc_feature (321437)..(321437): n is a or c or g or t.
  misc_feature (527833)..(527833): n is a or c or g or t.
  misc_feature (527901)..(527901): n is a or c or g or t.
  misc_feature (527978)..(527978): n is a or c or g or t.
  misc_feature (960838)..(960839): n is a or c or g or t.
  misc_feature (960860)..(960861): n is a or c or g or t.
  misc_feature (960872)..(960873): n is a or c or g or t.
  misc_feature (960879)..(960879): n is a or c or g or t.
  misc_feature (960890)..(960890): n is a or c or g or t.
  misc_feature (1250239)..(1250239): n is a or c or g or t.
  misc_feature (1302432)..(1302434): n is a or c or g or t.
  misc_feature (1302471)..(1302471): n is a or c or g or t.
  misc_feature (1302488)..(1302488): n is a or c or g or t.
  misc_feature (1674836)..(1674836): n is a or c or g or t.
VTPMKIVVVGSGTAGSNFALFMRKLDRKAEITVIGKEPTMQYSPCALPHVVSGTIEKPEDIIVFPNEFYEKQKINLMLNTEAKAIDRERKVVVTDKGEVPYDKLVLAVGSKAFIPPIKGVENEGVFTLKSLDDVRRIKAYIAERKPKKAVVIGAGLIGLEGAEAFAKLGMEVLIVELMDRLMPTMLDKDTAKLVQAEMEKYGVSFRFGVGVSEIIGSPVRAVKIGDEEVPADLVLVATGVRANTDLAKQAGLEVNRGIVVNEHLQTSDPEVYAIGDCAEVIDAVTGKRTLSQLGTSAVRMAKVAAEHIAGKDVSFRPVFNTAITELFGLEIGTFGITEERAKKEDIEVAVGKFKGSTKPEYYPGGKPITVKLIFRKSDRKLIGGQIVGGERVWGRIMTLSALAQKGATVEDVAYLETAYAPPISPTIDPITVAAEMAQRKLR

SEQ ID NO: 1801 - protein, 380 aa, Thermococcus kodakaraensis KOD1
  misc_feature (321437)..(321437): n is a or c or g or t.
  misc_feature (527833)..(527833): n is a or c or g or t.
  misc_feature (527901)..(527901): n is a or c or g or t.
  misc_feature (527978)..(527978): n is a or c or g or t.
  misc_feature (960838)..(960839): n is a or c or g or t.
  misc_feature (960860)..(960861): n is a or c or g or t.
  misc_feature (960872)..(960873): n is a or c or g or t.
  misc_feature (960879)..(960879): n is a or c or g or t.
  misc_feature (960890)..(960890): n is a or c or g or t.
  misc_feature (1250239)..(1250239): n is a or c or g or t.
  misc_feature (1302432)..(1302434): n is a or c or g or t.
  misc_feature (1302471)..(1302471): n is a or c or g or t.
  misc_feature (1302488)..(1302488): n is a or c or g or t.
  misc_feature (1674836)..(1674836): n is a or c or g or t.
MTLVEELLGAKTGEVVVREVDLVYAHDGTMPLIIEAFRRNFTRVVPRTYVFFDHVFPAPTVKIANLQKEILEFAGEQGIPVIQGQGISHQLAVEMGLADNARIVVGADSHTPTLGALGVFAVGIGATDTAVVMGLGKTWFRVPESVSVVFEGRPGKNVMAADAMIHIITALRDFEMNYKAIEFFNVPFSFDERLTLTNFSVEANAKTGIIGEEYSGDGYVLELGIDLSSLPPMVAKPHHPSNGVPVEEVEGTKIDQVFIGSCTNGRFEQIERAAEILAGEEVAVRTIIGPASANVYRRMIETGIAKVLIDAGAVILPPGCGPCLGRHMGVAGDGDVILSTTNRNFRGRMGSPNSEIYLASPVTAALSALYGEITTPEGGA

SEQ ID NO: 1802 - protein, 330 aa, Thermococcus kodakaraensis KOD1
  misc_feature (321437)..(321437): n is a or c or g or t.
  misc_feature (527833)..(527833): n is a or c or g or t.
  misc_feature (527901)..(527901): n is a or c or g or t.
  misc_feature (527978)..(527978): n is a or c or g or t.
  misc_feature (960838)..(960839): n is a or c or g or t.
  misc_feature (960860)..(960861): n is a or c or g or t.
  misc_feature (960872)..(960873): n is a or c or g or t.
  misc_feature (960879)..(960879): n is a or c or g or t.
  misc_feature (960890)..(960890): n is a or c or g or t.
  misc_feature (1250239)..(1250239): n is a or c or g or t.
  misc_feature (1302432)..(1302434): n is a or c or g or t.
  misc_feature (1302471)..(1302471): n is a or c or g or t.
  misc_feature (1302488)..(1302488): n is a or c or g or t.
  misc_feature (1674836)..(1674836): n is a or c or g or t.
MIKAAVVGASGYIGGELVRLLAMHPEVEITAITSRRFAGQKVHKVHPNLRGLDLRFTNTKEFDADVIFLAVPHGTSMEIIDDYLGSAKIIDMSADFRLREDLYREYYGEHKRPELIEEFVYGLPELHRKEIRKAELVANPGCNATATILALYPFRELTDEAIVDLKVSSSAGGRRENVASIHPERSHVVRVYKPYHHRHEGEVIQETGVKAAFTVHSVDIIRGLLATIYFRFEGSTRELLRKLLVYKDEPFVRLVTDKGGLQRFPDPKYVIGSNFADIGFAHDEENSRAIVLSAIDNLIKGGSGQAVQNMNLMFGLDERTGLNYYPVYPV

SEQ ID NO: 1803 - protein, 251 aa, Thermococcus kodakaraensis KOD1
  misc_feature (321437)..(321437): n is a or c or g or t.
  misc_feature (527833)..(527833): n is a or c or g or t.
  misc_feature (527901)..(527901): n is a or c or g or t.
  misc_feature (527978)..(527978): n is a or c or g or t.
  misc_feature (960838)..(960839): n is a or c or g or t.
  misc_feature (960860)..(960861): n is a or c or g or t.
  misc_feature (960872)..(960873): n is a or c or g or t.
  misc_feature (960879)..(960879): n is a or c or g or t.
  misc_feature (960890)..(960890): n is a or c or g or t.
  misc_feature (1250239)..(1250239): n is a or c or g or t.
  misc_feature (1302432)..(1302434): n is a or c or g or t.
  misc_feature (1302471)..(1302471): n is a or c or g or t.
  misc_feature (1302488)..(1302488): n is a or c or g or t.
  misc_feature (1674836)..(1674836): n is a or c or g or t.
MRIVKIGGAALVRFEEVWASDGLSSSLRSPDTVVVHGGSRHVDELSRKLGVKIKRLTSPSGVTFRRTTKEVLDVYLAAMMRANRELVEFLQVRGINAVGVMGIEHELVIGRRKKLVKAVINGKTVAIRDDYSGTVERINVGALMELRKLGLPVIASVAYDPVENVPLNVDGDKVAYHMALATKARELVFVSDSAFMADGSVVERVNLNELPELLGYAKGGMRKKLMMAAKAVESGVERVVIQGLNGRTVIT

SEQ ID NO: 1804 - protein, 132 aa, Thermococcus kodakaraensis KOD1
  misc_feature (321437)..(321437): n is a or c or g or t.
  misc_feature (527833)..(527833): n is a or c or g or t.
  misc_feature (527901)..(527901): n is a or c or g or t.
  misc_feature (527978)..(527978): n is a or c or g or t.
  misc_feature (960838)..(960839): n is a or c or g or t.
  misc_feature (960860)..(960861): n is a or c or g or t.
  misc_feature (960872)..(960873): n is a or c or g or t.
  misc_feature (960879)..(960879): n is a or c or g or t.
  misc_feature (960890)..(960890): n is a or c or g or t.
  misc_feature (1250239)..(1250239): n is a or c or g or t.
  misc_feature (1302432)..(1302434): n is a or c or g or t.
  misc_feature (1302471)..(1302471): n is a or c or g or t.
  misc_feature (1302488)..(1302488): n is a or c or g or t.
  misc_feature (1674836)..(1674836): n is a or c or g or t.
MISSEEKVEFLRKLVEIYSPTGRESEAVKFIVESFESFGVDAYVDEVGNAIAIREGKGPRILLAGHVDTVPGIIPVRIEDGVLWGRGSVDAKGPLATFFFATLESNANIIFAGLVDEEGFSQGRQEPRRSQT

SEQ ID NO: 1805 - protein, 123 aa, Thermococcus kodakaraensis KOD1
  misc_feature (321437)..(321437): n is a or c or g or t.
  misc_feature (527833)..(527833): n is a or c or g or t.
  misc_feature (527901)..(527901): n is a or c or g or t.
  misc_feature (527978)..(527978): n is a or c or g or t.
  misc_feature (960838)..(960839): n is a or c or g or t.
  misc_feature (960860)..(960861): n is a or c or g or t.
  misc_feature (960872)..(960873): n is a or c or g or t.
  misc_feature (960879)..(960879): n is a or c or g or t.
  misc_feature (960890)..(960890): n is a or c or g or t.
  misc_feature (1250239)..(1250239): n is a or c or g or t.
  misc_feature (1302432)..(1302434): n is a or c or g or t.
  misc_feature (1302471)..(1302471): n is a or c or g or t.
  misc_feature (1302488)..(1302488): n is a or c or g or t.
  misc_feature (1674836)..(1674836): n is a or c or g or t.
VIGDVPPIYEVFKPGDVPPMGDAPPILVTPGGEEVIRKLVLRALNENQRLILRSISGRHRSLNSLLEELSRKERKALSTLKLNARILKELGLIDYGTKENPRPVRLTEHGRMILSLLEVDGHE

SEQ ID NO: 1806 - protein, 347 aa, Thermococcus kodakaraensis KOD1
  misc_feature (321437)..(321437): n is a or c or g or t.
  misc_feature (527833)..(527833): n is a or c or g or t.
  misc_feature (527901)..(527901): n is a or c or g or t.
  misc_feature (527978)..(527978): n is a or c or g or t.
  misc_feature (960838)..(960839): n is a or c or g or t.
  misc_feature (960860)..(960861): n is a or c or g or t.
  misc_feature (960872)..(960873): n is a or c or g or t.
  misc_feature (960879)..(960879): n is a or c or g or t.
  misc_feature (960890)..(960890): n is a or c or g or t.
  misc_feature (1250239)..(1250239): n is a or c or g or t.
  misc_feature (1302432)..(1302434): n is a or c or g or t.
  misc_feature (1302471)..(1302471): n is a or c or g or t.
  misc_feature (1302488)..(1302488): n is a or c or g or t.
  misc_feature (1674836)..(1674836): n is a or c or g or t.
VEGLRLGGYGGSQQEGGAQEGPRNGQKTRGKAEGHHSEVGSVIESFREAFGRALVELGEENPNIVVLDADVKSSTKTAYFERAFPERFIQVGISEQDMVSMAGGLAIGGKIPVVSAFAAFLMRAWEQIRNTIARDNLNVKLIPTHSGFSDHMDGSSHQCLEDIALMRVLPNMTVVVPADAPSVPVLLKQVIELEGPVYMRLGRDHAPRVYDSPKLKLGKASVLRKGSDVLLVAAGVMVSVALETARKLEERGISAGVVDMHTIKPLDEETLLRLAAKVDLVVTLEEHSIHGGLGGAVAEVLSEKMPKRLIRIGTTEFGRSSRDYFSLLERYGLTAESVVKKVEVMLT

SEQ ID NO: 1807 - protein, 126 aa, Thermococcus kodakaraensis KOD1
  misc_feature (321437)..(321437): n is a or c or g or t.
  misc_feature (527833)..(527833): n is a or c or g or t.
  misc_feature (527901)..(527901): n is a or c or g or t.
  misc_feature (527978)..(527978): n is a or c or g or t.
  misc_feature (960838)..(960839): n is a or c or g or t.
  misc_feature (960860)..(960861): n is a or c or g or t.
  misc_feature (960872)..(960873): n is a or c or g or t.
  misc_feature (960879)..(960879): n is a or c or g or t.
  misc_feature (960890)..(960890): n is a or c or g or t.
  misc_feature (1250239)..(1250239): n is a or c or g or t.
  misc_feature (1302432)..(1302434): n is a or c or g or t.
  misc_feature (1302471)..(1302471): n is a or c or g or t.
  misc_feature (1302488)..(1302488): n is a or c or g or t.
  misc_feature (1674836)..(1674836): n is a or c or g or t.
VIGFPARHSLSPVMHNAAFRALGINAVYLAFEVPPEELGEAIGGAKALGISGLNVTMPHKEAVIHFLDSLSEDSGEIGSVNTVVNRKGRLEGHTTDGLGARRALERASSWGEGGYSSSERAVRGRQ

SEQ ID NO: 1808 - protein, 186 aa, Thermococcus kodakaraensis KOD1
  misc_feature (321437)..(321437): n is a or c or g or t.
  misc_feature (527833)..(527833): n is a or c or g or t.
  misc_feature (527901)..(527901): n is a or c or g or t.
  misc_feature (527978)..(527978): n is a or c or g or t.
  misc_feature (960838)..(960839): n is a or c or g or t.
  misc_feature (960860)..(960861): n is a or c or g or t.
  misc_feature (960872)..(960873): n is a or c or g or t.
  misc_feature (960879)..(960879): n is a or c or g or t.
  misc_feature (960890)..(960890): n is a or c or g or t.
  misc_feature (1250239)..(1250239): n is a or c or g or t.
  misc_feature (1302432)..(1302434): n is a or c or g or t.
  misc_feature (1302471)..(1302471): n is a or c or g or t.
  misc_feature (1302488)..(1302488): n is a or c or g or t.
  misc_feature (1674836)..(1674836): n is a or c or g or t.
MGLKSSSAAANALSKALADALGLDMSEMEVVKAGVEAAKRAGVTLTGAFDDACASYFGSLWVTDNLGMRVLHSSKVEPLPVVLLLPGKTLLTESLGGRDFSPIRPYVEEAVRLALEGEWRKAALINGLVYSTYLGHPIEPFRIALERGAVVGLSGKGPAVFAVTNEPEELAEEWEQFGKVLTTELR

SEQ ID NO: 1809 - protein, 419 aa, Thermococcus kodakaraensis KOD1
  misc_feature (321437)..(321437): n is a or c or g or t.
  misc_feature (527833)..(527833): n is a or c or g or t.
  misc_feature (527901)..(527901): n is a or c or g or t.
  misc_feature (527978)..(527978): n is a or c or g or t.
  misc_feature (960838)..(960839): n is a or c or g or t.
  misc_feature (960860)..(960861): n is a or c or g or t.
  misc_feature (960872)..(960873): n is a or c or g or t.
  misc_feature (960879)..(960879): n is a or c or g or t.
  misc_feature (960890)..(960890): n is a or c or g or t.
  misc_feature (1250239)..(1250239): n is a or c or g or t.
  misc_feature (1302432)..(1302434): n is a or c or g or t.
  misc_feature (1302471)..(1302471): n is a or c or g or t.
  misc_feature (1302488)..(1302488): n is a or c or g or t.
  misc_feature (1674836)..(1674836): n is a or c or g or t.
MVKTKLHALKRLEGLSMDLIKKFKLLMALMSTGFLGNLLVIYFLSKGFSYAQIGLETSVMVLGGFLFEVPTGVVGDKISRKLSVLLGFTIHAFGSVVLLFLHNFPMLLLYALISALGASFVSGSFEAWLFDDLKHIGREREYRKVMREAKSITIPLSATTLVVGAFLAQFYGFTLPIVLGLIVELLAVVLILSIPEYEFKKTERNYLGHTLSSLRELFQPRLFWLVLLSIIVGMQTNQFRKFFEPYLGGVLAKSLGTTLMGTLGLLGVVEVTVRTVPRLIGVRLRDSWSRKAYSLAPVLLPLLTVLSVVYTNPLWIVALGIALTIITAAFGFNLNVEFQHRIPSEKRATILSLDRMLAGLVMAVFYAVYGFAVDKLGLSGARLMFAIALLVLGAGFKAGEVLGFLGEHLKLHHLEESGD

SEQ ID NO: 1810 - protein, 110 aa, Thermococcus kodakaraensis KOD1
  misc_feature (321437)..(321437): n is a or c or g or t.
  misc_feature (527833)..(527833): n is a or c or g or t.
  misc_feature (527901)..(527901): n is a or c or g or t.
  misc_feature (527978)..(527978): n is a or c or g or t.
  misc_feature (960838)..(960839): n is a or c or g or t.
  misc_feature (960860)..(960861): n is a or c or g or t.
  misc_feature (960872)..(960873): n is a or c or g or t.
  misc_feature (960879)..(960879): n is a or c or g or t.
  misc_feature (960890)..(960890): n is a or c or g or t.
  misc_feature (1250239)..(1250239): n is a or c or g or t.
  misc_feature (1302432)..(1302434): n is a or c or g or t.
  misc_feature (1302471)..(1302471): n is a or c or g or t.
  misc_feature (1302488)..(1302488): n is a or c or g or t.
  misc_feature (1674836)..(1674836): n is a or c or g or t.
VSVALIDPYPEWGEEALEWVRRKAEVYEIAGFKFLVEKGRATFTPLSFGLGCIKAMLPAMAWVAKDRDEAFDLMLPASMREVLPGLKRLGLSLWDETDEPNVLVFRKDLT

SEQ ID NO: 1811 - protein, 338 aa, Thermococcus kodakaraensis KOD1
  misc_feature (321437)..(321437): n is a or c or g or t.
  misc_feature (527833)..(527833): n is a or c or g or t.
  misc_feature (527901)..(527901): n is a or c or g or t.
  misc_feature (527978)..(527978): n is a or c or g or t.
  misc_feature (960838)..(960839): n is a or c or g or t.
  misc_feature (960860)..(960861): n is a or c or g or t.
  misc_feature (960872)..(960873): n is a or c or g or t.
  misc_feature (960879)..(960879): n is a or c or g or t.
  misc_feature (960890)..(960890): n is a or c or g or t.
  misc_feature (1250239)..(1250239): n is a or c or g or t.
  misc_feature (1302432)..(1302434): n is a or c or g or t.
  misc_feature (1302471)..(1302471): n is a or c or g or t.
  misc_feature (1302488)..(1302488): n is a or c or g or t.
  misc_feature (1674836)..(1674836): n is a or c or g or t.
VWDMGKLDVIQAKGTERLKRGFAKMVKGGVIMDVTNAEQARIAEEAGAVSVMALHRVPADIRKAGGVARMAPIEKIQEIMDAVTIPVMAKVRIGHVAEAKILEALGVDMIDESEVLTPSDPFFHIDKREFTVPFVCGARNLGEAVRRIWEGAAMIRTKGEAGTGNIVEAVRHVRLVAEGIRQIQAMTDDQVYAVAEKFAEPYLRLSLNVKEIAGLPQRVLDNEPIYGHYTYREIVDGLYKILLEIKKLGRLPVVNFAAGGVATPADAALMMQMGMDGVFVGSGIFKSSNPPKMAKAIVEAVNHWDEPDVLVEISKEIGEPMRGQDIEELEVRLEERGV

SEQ ID NO: 1812 - protein, 162 aa, Thermococcus kodakaraensis KOD1
  misc_feature (321437)..(321437): n is a or c or g or t.
  misc_feature (527833)..(527833): n is a or c or g or t.
  misc_feature (527901)..(527901): n is a or c or g or t.
  misc_feature (527978)..(527978): n is a or c or g or t.
  misc_feature (960838)..(960839): n is a or c or g or t.
  misc_feature (960860)..(960861): n is a or c or g or t.
  misc_feature (960872)..(960873): n is a or c or g or t.
  misc_feature (960879)..(960879): n is a or c or g or t.
  misc_feature (960890)..(960890): n is a or c or g or t.
  misc_feature (1250239)..(1250239): n is a or c or g or t.
  misc_feature (1302432)..(1302434): n is a or c or g or t.
  misc_feature (1302471)..(1302471): n is a or c or g or t.
  misc_feature (1302488)..(1302488): n is a or c or g or t.
  misc_feature (1674836)..(1674836): n is a or c or g or t.
MIVVSDSGPLIALAKIEKLELLRELFGEIVIPRAVWAEVVEKGRGRPGSREVSEAEWIKVQDVNDRLSVEILMKEIEIGEAEAIVLARELNADLLVLDERIPRIIAKSLGIKVAGTLALLFIAKERGLLKEDLEPLLLELRTKGVRFSDKVVEALRKRFIKT

SEQ ID NO: 1813 - protein, 239 aa, Thermococcus kodakaraensis KOD1
  misc_feature (321437)..(321437): n is a or c or g or t.
  misc_feature (527833)..(527833): n is a or c or g or t.
  misc_feature (527901)..(527901): n is a or c or g or t.
  misc_feature (527978)..(527978): n is a or c or g or t.
  misc_feature (960838)..(960839): n is a or c or g or t.
  misc_feature (960860)..(960861): n is a or c or g or t.
  misc_feature (960872)..(960873): n is a or c or g or t.
  misc_feature (960879)..(960879): n is a or c or g or t.
  misc_feature (960890)..(960890): n is a or c or g or t.
  misc_feature (1250239)..(1250239): n is a or c or g or t.
  misc_feature (1302432)..(1302434): n is a or c or g or t.
  misc_feature (1302471)..(1302471): n is a or c or g or t.
  misc_feature (1302488)..(1302488): n is a or c or g or t.
  misc_feature (1674836)..(1674836): n is a or c or g or t.
MVISVDVYEGKAKKIIPLDDGKVIMEFKDDATAFNGEKKAQFRGKGWLNAQISAHLFRVLEASGIKTHFIGVAGDNRLIVERLKMYPLEVVVRNVVAGSLKKRLPLEEGTELPEPIIEFYYKNDDLGDPMINQYHARVLGVGESELKEMEKIALQVNDVLRKYFAERGIILVDFKLEFGKNTRGEIVLGDEISPDTCRFWDAETKESLDKDVFRFGKGDLISAYERLYERITGEAPVRR

SEQ ID NO: 1814 - protein, 432 aa, Thermococcus kodakaraensis KOD1
  misc_feature (321437)..(321437): n is a or c or g or t.
  misc_feature (527833)..(527833): n is a or c or g or t.
  misc_feature (527901)..(527901): n is a or c or g or t.
  misc_feature (527978)..(527978): n is a or c or g or t.
  misc_feature (960838)..(960839): n is a or c or g or t.
  misc_feature (960860)..(960861): n is a or c or g or t.
  misc_feature (960872)..(960873): n is a or c or g or t.
  misc_feature (960879)..(960879): n is a or c or g or t.
  misc_feature (960890)..(960890): n is a or c or g or t.
  misc_feature (1250239)..(1250239): n is a or c or g or t.
  misc_feature (1302432)..(1302434): n is a or c or g or t.
  misc_feature (1302471)..(1302471): n is a or c or g or t.
  misc_feature (1302488)..(1302488): n is a or c or g or t.
  misc_feature (1674836)..(1674836): n is a or c or g or t.
VVLMIRPRDELGTATTDSAQKIVLLGSGELGKEIAIEAQRLGVEVIAVDRYANAPAMQIAHRSYVGDMRKADFLFSVVEREKPDAIIPEIEAINLDALFELEKDGYFVVPNAKATWIAMHRERTRETLAREAKVPTSRYTYASTLDELYEACEKIGYPCHTKAIMSSSGKGSYFVKGPEDVPKAWEEAKKKARGSAEKLIVEEHIDFDVEITELAVRHYDENGEVVTTFPKPVGHYQIDGDYHSSWQPAEISERAEREVYRIAKRITDVLGGLGIFGVEMFVKGDKVWANEVSPRPHDTGMVTLASHPTGFSEFGLHLRAVLGLPIPGEWVDGYRLFPMLTPAATHVIKANVSGYSPRFRGLAKALSVPNATVRLFGKPEAYPGRRLGVAIAWDKDVGEAKRKAEMVAHSIELRTRSANWHSQDYEKRKHLL

SEQ ID NO: 1815 - protein, 435 aa, Thermococcus kodakaraensis KOD1
  misc_feature (321437)..(321437): n is a or c or g or t.
  misc_feature (527833)..(527833): n is a or c or g or t.
  misc_feature (527901)..(527901): n is a or c or g or t.
  misc_feature (527978)..(527978): n is a or c or g or t.
  misc_feature (960838)..(960839): n is a or c or g or t.
  misc_feature (960860)..(960861): n is a or c or g or t.
  misc_feature (960872)..(960873): n is a or c or g or t.
  misc_feature (960879)..(960879): n is a or c or g or t.
  misc_feature (960890)..(960890): n is a or c or g or t.
  misc_feature (1250239)..(1250239): n is a or c or g or t.
  misc_feature (1302432)..(1302434): n is a or c or g or t.
  misc_feature (1302471)..(1302471): n is a or c or g or t.
  misc_feature (1302488)..(1302488): n is a or c or g or t.
  misc_feature (1674836)..(1674836): n is a or c or g or t.
MVKLMRVLLVGAGGRENAIAEVLARDAELYVVAGHKNPGIARLAKDYALAKETDVPRVLDFALKWGVDMAFIGPEAPLEKGIVNVLEENGVPTVGPTREAAMLETNKAFARWLMEEYKIPGRKLFKVFDDVSEMKSWIDDFGRPVVVKPLGLTGGKGVKVVGYQLKDNEEAKAYAEELIKRDGKVLIEERTDGVEFTFQVFTDGKRVVPMPLAQDYPHAYEGDVGPITGGMGSYSCEDHRLPFITKEDYEKALETLKATVEAMRKNGTPYKGILYGQFMLAKDEPKIIEFNARFGDPEAMNVLPILKRSLVEIGEEIVDGNLKGAEFERKATVVKYIAPKGYPTNPVRGIKLHVDEAKIREEGARVYYASLDENFRMLGSRALAVVGIADSLEEAERIASAGIRHVRGEIFYRKDVGTRESIARRIELVRAMRGE

SEQ ID NO: 1816 - protein, 223 aa, Thermococcus kodakaraensis KOD1
  misc_feature (321437)..(321437): n is a or c or g or t.
  misc_feature (527833)..(527833): n is a or c or g or t.
  misc_feature (527901)..(527901): n is a or c or g or t.
  misc_feature (527978)..(527978): n is a or c or g or t.
  misc_feature (960838)..(960839): n is a or c or g or t.
  misc_feature (960860)..(960861): n is a or c or g or t.
  misc_feature (960872)..(960873): n is a or c or g or t.
  misc_feature (960879)..(960879): n is a or c or g or t.
  misc_feature (960890)..(960890): n is a or c or g or t.
  misc_feature (1250239)..(1250239): n is a or c or g or t.
  misc_feature (1302432)..(1302434): n is a or c or g or t.
  misc_feature (1302471)..(1302471): n is a or c or g or t.
  misc_feature (1302488)..(1302488): n is a or c or g or t.
  misc_feature (1674836)..(1674836): n is a or c or g or t.
MVKFAVVVFPGTNCDFETERAIRKAGAEAERVWYKTSLKDFDGVVLPGGFSYADYLRAGAIAARQEIIEEVKEFARDGKPVLGICNGFQVLTEAGLLPGALRPNKVPRFICRWVHLRVADTETPFTQFYEPGEVIRMPIAHAEGNYYADDPSKVRIAFQYSDEEGNITEEANPNGSLLNIAAIANENGNVLGTMPHPERASDRFLGSEDGLKLFRSMVEWARK

SEQ ID NO: 1817 - protein, 713 aa, Thermococcus kodakaraensis KOD1
  misc_feature (321437)..(321437): n is a or c or g or t.
  misc_feature (527833)..(527833): n is a or c or g or t.
  misc_feature (527901)..(527901): n is a or c or g or t.
  misc_feature (527978)..(527978): n is a or c or g or t.
  misc_feature (960838)..(960839): n is a or c or g or t.
  misc_feature (960860)..(960861): n is a or c or g or t.
  misc_feature (960872)..(960873): n is a or c or g or t.
  misc_feature (960879)..(960879): n is a or c or g or t.
  misc_feature (960890)..(960890): n is a or c or g or t.
  misc_feature (1250239)..(1250239): n is a or c or g or t.
  misc_feature (1302432)..(1302434): n is a or c or g or t.
  misc_feature (1302471)..(1302471): n is a or c or g or t.
  misc_feature (1302488)..(1302488): n is a or c or g or t.
  misc_feature (1674836)..(1674836): n is a or c or g or t.
MFPHEEKLIRERLGREPNEVEKAMLEVMWSEHASYKSSRPFLKLLPTENEHVVLGPGEDAGIVKFDDETWIAVGIESHNHPSAVEPYGGAATGVGGIVRDILCMGARPIALLDPIRFGPLEKERNRYLLQGVVKGIADYGNRIGVPTVGGETEFDESLDNYTLVNVACVGIMRPEHFVHSYVEEAGLKLVLVGNRTGRDGIHGVTFASEELSENAEEEDRSAVQIPDPFTEKLLIEATLEAVYTGKVRALKDLGGGGLTCASSEMAGKKGFGAVIYADRVPLREPNMTPTEVMISESQERMLFAVREEDVEEIGKIFEKYGLEWTVVGEIIKEPRYIVYWKGEKVADLPIDLLTEVPTIEWETRPYSLERDVETPKISFSDAFELVWSSPNVLNKRWVWEQYDHEVQGRTVVKPGRDAAVLKINERYGLAFVADGNPNHSHLNPYHGAMGAVAEVVRNLVSVGAEPLALVDNLNFASPERPEVYWSFAETVRGLADAARAFGLAYVSGNVSFYNEVVDRPIKPTPVVAGLGKVELEKIPGFGLEEGLLIGVVGSTKRELGGSELYVRLGLKGGIAPRVNLEEEKANAEGILEAIRRGLLKAVHDVSKGGIAVALAEMAVLGNTGFTADLSKVPAETSNPLEVAFSESHGRYIVVFPEERLEELKALFRHFAVIGRAGGSGAVFLWNGDELLRKPITKLREVHESFPKLLGEEE

SEQ ID NO: 1818 - protein, 350 aa, Thermococcus kodakaraensis KOD1
  misc_feature (321437)..(321437): n is a or c or g or t.
  misc_feature (527833)..(527833): n is a or c or g or t.
  misc_feature (527901)..(527901): n is a or c or g or t.
  misc_feature (527978)..(527978): n is a or c or g or t.
  misc_feature (960838)..(960839): n is a or c or g or t.
  misc_feature (960860)..(960861): n is a or c or g or t.
  misc_feature (960872)..(960873): n is a or c or g or t.
  misc_feature (960879)..(960879): n is a or c or g or t.
  misc_feature (960890)..(960890): n is a or c or g or t.
  misc_feature (1250239)..(1250239): n is a or c or g or t.
  misc_feature (1302432)..(1302434): n is a or c or g or t.
  misc_feature (1302471)..(1302471): n is a or c or g or t.
  misc_feature (1302488)..(1302488): n is a or c or g or t.
  misc_feature (1674836)..(1674836): n is a or c or g or t.
MSKLLKPKREVGIIGYGAYVPMYRIKAEEIGRVWGVSSFPIQEKSVPGLDEDTITIGIEAARNALKRAQIDPKLIRAIWLGTESKPYAVKPSGTVIAEAIGATPDLDAADFEFACKAGTEAIQAAIGFVGSGMADYAMAIGADTSQGRPGDHLEFTAAAGGAAYILAPKSSETLAYFEASYSYVTDTPDFWRRQHEHYPRHGNRFTGEPAYFHQIINAAKTLMEELGYTPNDFDYAVFHQPNVKFPLTAAKILGFPKEKVLPGLLSGIIGNTYSGATLVGVSAVLDIAKPGDRILWVSFGSGAGSDAFSLVVQDAIEEKRDLAPKTMDYVNRKKYIDYALYAKHRGKYIL

SEQ ID NO: 1819 - protein, 688 aa, Thermococcus kodakaraensis KOD1
  misc_feature (321437)..(321437): n is a or c or g or t.
  misc_feature (527833)..(527833): n is a or c or g or t.
  misc_feature (527901)..(527901): n is a or c or g or t.
  misc_feature (527978)..(527978): n is a or c or g or t.
  misc_feature (960838)..(960839): n is a or c or g or t.
  misc_feature (960860)..(960861): n is a or c or g or t.
  misc_feature (960872)..(960873): n is a or c or g or t.
  misc_feature (960879)..(960879): n is a or c or g or t.
  misc_feature (960890)..(960890): n is a or c or g or t.
  misc_feature (1250239)..(1250239): n is a or c or g or t.
  misc_feature (1302432)..(1302434): n is a or c or g or t.
  misc_feature (1302471)..(1302471): n is a or c or g or t.
  misc_feature (1302488)..(1302488): n is a or c or g or t.
  misc_feature (1674836)..(1674836): n is a or c or g or t.
MSCTSFQEGQQRATLLSQPGLPALGRKMNEKEVLLSKFIAHLKELVEMERRAEIEAMRLEMRRLSGREREKVGRAVLGLNGKVIGEELGYFLVRYGRDREIKTEISVGDLVVISKRDPLKSDLVGTVVEKGKRFLTVAIETVPEWALKGVRIDLYANDITFKRWMENLDNLRESGRKALELYLGLREPEESEPVEFQPFDKSLNASQRGAIAKALGSGDFFLVHGPFGTGKTRTLVELIRQEVARGHKVLATAESNVAVDNIVERLADSGLKVVRIGHPSRVSKALHETTLAYLITQHDLYAELRELRVIGENLKEKRDTFTKPAPKYRRGLSDREILRLAEKGIGTRGVPARLIREMAEWIRINQQVQKTFDDARKLEERIAREIIQEADVVLTTNASAGLEVVDYGEYDVAVIDEATQATIPSVLIPINRAKRFVLAGDHKQLPPTILSEKAKELSKTLFEGLIERYPEKSEMLTVQYRMNERLMEFPSREFYDGKIKAHESVKNITLADLGVSEPEFGNFWDEALKPENVLVFIDTSKREDRFERQRRGSDSRENPLEAKLVTETVEKLLEMGVKPDWIGVITPYDDQRDLISSMVGEDIEVKTVDGYQGREKEIIVLSFVRSNRRGELGFLTDLRRLNVSLTRAKRKLIAVGDSSTLSNHPTYRRFIEFVRERGTFIEIDGKKH

SEQ ID NO: 1820 - protein, 198 aa, Thermococcus kodakaraensis KOD1
  misc_feature (321437)..(321437): n is a or c or g or t.
  misc_feature (527833)..(527833): n is a or c or g or t.
  misc_feature (527901)..(527901): n is a or c or g or t.
  misc_feature (527978)..(527978): n is a or c or g or t.
  misc_feature (960838)..(960839): n is a or c or g or t.
  misc_feature (960860)..(960861): n is a or c or g or t.
  misc_feature (960872)..(960873): n is a or c or g or t.
  misc_feature (960879)..(960879): n is a or c or g or t.
  misc_feature (960890)..(960890): n is a or c or g or t.
  misc_feature (1250239)..(1250239): n is a or c or g or t.
  misc_feature (1302432)..(1302434): n is a or c or g or t.
  misc_feature (1302471)..(1302471): n is a or c or g or t.
  misc_feature (1302488)..(1302488): n is a or c or g or t.
  misc_feature (1674836)..(1674836): n is a or c or g or t.
VFLYTENFDEQKEKAMEGLRKALEEDKVDHDIIPLLEKINALQNYFTTSSCSGRISVMEMPHFGDKVNSVWLGKWHREVRLEEVLEAVGKHRSGQLWFLVRSPILHVGARTLEDAVRLLNLAIGLGFKYSNIKSVSHKKLVVEIRSTERMDVPLGENGELWVDEAYIEKIVNLANAQVRRFKGKLKRLEEEIEKLQED

SEQ ID NO: 1821 - protein, 103 aa, Thermococcus kodakaraensis KOD1
  misc_feature (321437)..(321437): n is a or c or g or t.
  misc_feature (527833)..(527833): n is a or c or g or t.
  misc_feature (527901)..(527901): n is a or c or g or t.
  misc_feature (527978)..(527978): n is a or c or g or t.
  misc_feature (960838)..(960839): n is a or c or g or t.
  misc_feature (960860)..(960861): n is a or c or g or t.
  misc_feature (960872)..(960873): n is a or c or g or t.
  misc_feature (960879)..(960879): n is a or c or g or t.
  misc_feature (960890)..(960890): n is a or c or g or t.
  misc_feature (1250239)..(1250239): n is a or c or g or t.
  misc_feature (1302432)..(1302434): n is a or c or g or t.
  misc_feature (1302471)..(1302471): n is a or c or g or t.
  misc_feature (1302488)..(1302488): n is a or c or g or t.
  misc_feature (1674836)..(1674836): n is a or c or g or t.
VPKMVIAEFVIVPLGEKSLSRYVAEVVKLLDRKGVKYQLTPMATIIEAPTVEDVLKIVAEAHELMFKLGAERVSTTVRIDDRRDKERHMEDKVKSVMEKVRGG

SEQ ID NO: 1822 - protein, 96 aa, Thermococcus kodakaraensis KOD1
  misc_feature (321437)..(321437): n is a or c or g or t.
  misc_feature (527833)..(527833): n is a or c or g or t.
  misc_feature (527901)..(527901): n is a or c or g or t.
  misc_feature (527978)..(527978): n is a or c or g or t.
  misc_feature (960838)..(960839): n is a or c or g or t.
  misc_feature (960860)..(960861): n is a or c or g or t.
  misc_feature (960872)..(960873): n is a or c or g or t.
  misc_feature (960879)..(960879): n is a or c or g or t.
  misc_feature (960890)..(960890): n is a or c or g or t.
  misc_feature (1250239)..(1250239): n is a or c or g or t.
  misc_feature (1302432)..(1302434): n is a or c or g or t.
  misc_feature (1302471)..(1302471): n is a or c or g or t.
  misc_feature (1302488)..(1302488): n is a or c or g or t.
  misc_feature (1674836)..(1674836): n is a or c or g or t.
VTTNAGMGANYSVSFYDPERNGFLLNETPKGQLNGYLKIKHAGYYFAQINSYYAPVTLAYRMTSKYPSRRILEIKYFTGGTSAIILALLLFREGRR

SEQ ID NO: 1823 - protein, 633 aa, Thermococcus kodakaraensis KOD1
  misc_feature (321437)..(321437): n is a or c or g or t.
  misc_feature (527833)..(527833): n is a or c or g or t.
  misc_feature (527901)..(527901): n is a or c or g or t.
  misc_feature (527978)..(527978): n is a or c or g or t.
  misc_feature (960838)..(960839): n is a or c or g or t.
  misc_feature (960860)..(960861): n is a or c or g or t.
  misc_feature (960872)..(960873): n is a or c or g or t.
  misc_feature (960879)..(960879): n is a or c or g or t.
  misc_feature (960890)..(960890): n is a or c or g or t.
  misc_feature (1250239)..(1250239): n is a or c or g or t.
  misc_feature (1302432)..(1302434): n is a or c or g or t.
  misc_feature (1302471)..(1302471): n is a or c or g or t.
  misc_feature (1302488)..(1302488): n is a or c or g or t.
  misc_feature (1674836)..(1674836): n is a or c or g or t.
MTNVEAKSLSLKGFFTGGRTTVTPVLTSSPSMRVVCPTLTPRSAIEFLFPGSWRPILIPRSGAFMGVTGMSSPPDLNNLAQSTLINPKNRVIGMRPKALAVILPPLAFLVFFFYAPILSILSLGVWENGPTLEYLRAVLSNEYHRNVILFTISQALASTVLTVLIGLPGAYIFANYDFPGKRLIKAVLTVPFVMPGIMVALGFVILFGKGGIIAGLIGRDPGIIYSWKAILLAHSFYNFPIVVRMVSALWQRVNPHYEEMAEVLGAKGFTLFRKVTLPLISPAIFASAMLTFVFCFLSFSVPLILGGYQYVTIEVDIFSTIVTLLDFRTGAALAIIQLSLSVVFMYLYLKALEAYSKREEQRIMRKPKELTIRSILSPKGLGIVLYSIFVVVFILAPLGAVVYDSLRFNGTWSLEWYRRIFSTEYNPMFGTSTLGAIRNSLLFGFATVFLSTLVGLPIAYFLNRWKFKGKVLLDALAMLPLASSPITIGFAYVKFFSTTPLYYTIWIIVIAHTVIAYPFVLRSVSTALKKIKPNLREAALSLGAGEWKAFLRVELPLAAGGLVVGAIFAFAMSIAELGATYMLATPEYTTMTIAIYKFLGARQFGSASALSVLLMAVSALGFIIIERTGEEVW

SEQ ID NO: 1824 - protein, 460 aa, Thermococcus kodakaraensis KOD1
  misc_feature (321437)..(321437): n is a or c or g or t.
  misc_feature (527833)..(527833): n is a or c or g or t.
  misc_feature (527901)..(527901): n is a or c or g or t.
  misc_feature (527978)..(527978): n is a or c or g or t.
  misc_feature (960838)..(960839): n is a or c or g or t.
  misc_feature (960860)..(960861): n is a or c or g or t.
  misc_feature (960872)..(960873): n is a or c or g or t.
  misc_feature (960879)..(960879): n is a or c or g or t.
  misc_feature (960890)..(960890): n is a or c or g or t.
  misc_feature (1250239)..(1250239): n is a or c or g or t.
  misc_feature (1302432)..(1302434): n is a or c or g or t.
  misc_feature (1302471)..(1302471): n is a or c or g or t.
  misc_feature (1302488)..(1302488): n is a or c or g or t.
  misc_feature (1674836)..(1674836): n is a or c or g or t.
VTLMGWFEEYFEFEKYGTDMKTEILAGVTTFLTMAYILFVNPSILSDAMGKEAFNSLVAVTALAAGFTTIFMGIYAKKPFALAPGMGLNAYFAYTVAPKYGWKVALAAVFVEGLIFIVLSVTKVRSAIIHAIPTGQKYAIGAGIGLFLTLIGLNDVGLLTAKVTAPAGSEFVINGEVNLIGKLAFTGLNAQALTTKAGLLFVFGLLLTGILIALRIKGALLISILTTSFLGWITGAAPWPESLFSMPDISYTFMKMDLHGLLNAGALGVVFAFFMVDFFDTLGTVTGLSAKAGFLTEDGKVPDAEKVLLTDAIGTTFGAVLGTSTVTTYIESAAGIEEGGRTGMTALVTGFLFLAIGLFIAPLAGAIPAFATAPALVIVGYYMLTALKEVDFSDPTEALPAFLVLVTIPYTYSIADGIGVGFISYTILKVFSGRWKEVHPLMYVLTIVFVAYFAYLGGVF

SEQ ID NO: 1825 - protein, 292 aa, Thermococcus kodakaraensis KOD1
  misc_feature (321437)..(321437): n is a or c or g or t.
  misc_feature (527833)..(527833): n is a or c or g or t.
  misc_feature (527901)..(527901): n is a or c or g or t.
  misc_feature (527978)..(527978): n is a or c or g or t.
  misc_feature (960838)..(960839): n is a or c or g or t.
  misc_feature (960860)..(960861): n is a or c or g or t.
  misc_feature (960872)..(960873): n is a or c or g or t.
  misc_feature (960879)..(960879): n is a or c or g or t.
  misc_feature (960890)..(960890): n is a or c or g or t.
  misc_feature (1250239)..(1250239): n is a or c or g or t.
  misc_feature (1302432)..(1302434): n is a or c or g or t.
  misc_feature (1302471)..(1302471): n is a or c or g or t.
  misc_feature (1302488)..(1302488): n is a or c or g or t.
  misc_feature (1674836)..(1674836): n is a or c or g or t.
VVRLMGYNEQERAFIEWYPRGYGVGFKVKRRLFETQTEYQRLEIYETEGFGKLLVLDGTVQLVEVGEESYHEVLVHPVMLAHPNPRKVLVIGGGDGGTLREVLRHDTVEKAIMVEIDEGVVEASYLYLDVAKDLLDRLIKKEEPRAELIIGDGVKYLRETDERFDVIIVDSTDPVGPAKLLFSEEFYRDAYEKLNEKGLYVTQAGSVYLFTNELLDAYKAMKKVFDRVYYFSFPVIGYASPWSFLVGVKGDVDFTRIDLERAKKLDLYYYDPERHETLFQMPRYVRKLLEGQ

SEQ ID NO: 1826 - protein, 272 aa, Thermococcus kodakaraensis KOD1
  misc_feature (321437)..(321437): n is a or c or g or t.
  misc_feature (527833)..(527833): n is a or c or g or t.
  misc_feature (527901)..(527901): n is a or c or g or t.
  misc_feature (527978)..(527978): n is a or c or g or t.
  misc_feature (960838)..(960839): n is a or c or g or t.
  misc_feature (960860)..(960861): n is a or c or g or t.
  misc_feature (960872)..(960873): n is a or c or g or t.
  misc_feature (960879)..(960879): n is a or c or g or t.
  misc_feature (960890)..(960890): n is a or c or g or t.
  misc_feature (1250239)..(1250239): n is a or c or g or t.
  misc_feature (1302432)..(1302434): n is a or c or g or t.
  misc_feature (1302471)..(1302471): n is a or c or g or t.
  misc_feature (1302488)..(1302488): n is a or c or g or t.
  misc_feature (1674836)..(1674836): n is a or c or g or t.
VETVRLEVLSREDMNELSRKLSRAGIMNRPVEETKPEIEHYLIVRGKYSKLVELSPKAPILGEELEAIQLAYEELMRDWEVGQEKPLSELFEEPDLSKLSLITALIEEGAVEERDGVLVLRGKPPLDNLELELRFPIDGLEEELDELDDLNATLITEYTLSKHYYVEVLEVDRELLENALEIAEEYATEESLVEATFDAIARSVLAEKILELAEKHRRKNELIEALMEIEPITVEAEGDRVNIYYDEDAIEDFLKTLQTLGYLKVKGNRIWV

SEQ ID NO: 1827 - protein, 647 aa, Thermococcus kodakaraensis KOD1
  misc_feature (321437)..(321437): n is a or c or g or t.
  misc_feature (527833)..(527833): n is a or c or g or t.
  misc_feature (527901)..(527901): n is a or c or g or t.
  misc_feature (527978)..(527978): n is a or c or g or t.
  misc_feature (960838)..(960839): n is a or c or g or t.
  misc_feature (960860)..(960861): n is a or c or g or t.
  misc_feature (960872)..(960873): n is a or c or g or t.
  misc_feature (960879)..(960879): n is a or c or g or t.
  misc_feature (960890)..(960890): n is a or c or g or t.
  misc_feature (1250239)..(1250239): n is a or c or g or t.
  misc_feature (1302432)..(1302434): n is a or c or g or t.
  misc_feature (1302471)..(1302471): n is a or c or g or t.
  misc_feature (1302488)..(1302488): n is a or c or g or t.
  misc_feature (1674836)..(1674836): n is a or c or g or t.
MAKVTDIVLWDKPGERVLLLGNHAIARGALEANIAVFAAYPGTPSSELTDTMAAVAKKAGVYMEYSTNEKVAFETALAAAWSGLRAMTAMKHVGLNVAADSFLSSVGMGVEGGFVIMVADDPSMWSSQNEQDTRVYAKFANVPVLEPSSPHEAKEMTKYAFELSEKFKHFVILRTTTRSSHARGDVVLGELPEEIKTGKRKFGKFKKDPTRFVDVPAHARKFHPLILEKIEKIREELNNCPFNWIEGKEDAKVGIIAPGLSYAYVKEALAWLGVEDVKILKLGTPFPVPYGLLGKFFDGLEKVLIVEELEPVVEEQVKTWAYDKGLRIPIHGKDLVPRVYEMTTRRAVEAIAKFLGLETPINFAEIDEKYEKVSQIVPPRPPSLCPACPHRNSFFAIRKAAGPKAIYPSDIGCYTLGVLPPLRTVDTTVAMGASIGIGHGLSIAMNGSLAEEEHKEGKEKQIIVATIGDSTFYHTGLPALANAIYNRSNVLIVVLDNLVTAMTGDQPNPGTGQTPHGMGKRIPIEDVAKAMGADFVAVVDPYDIKATYETIKKALEVEGVSVVVSRQVCALYKIGQMRRRGMKWPIYHVVEDKCTGCKICINAYGCPAIYWDPETKKAKVDPTMCWGCGGCAQVCPFDAFEPMKEGE

SEQ ID NO: 1828 - protein, 633 aa, Thermococcus kodakaraensis KOD1
  misc_feature (321437)..(321437): n is a or c or g or t.
  misc_feature (527833)..(527833): n is a or c or g or t.
  misc_feature (527901)..(527901): n is a or c or g or t.
  misc_feature (527978)..(527978): n is a or c or g or t.
  misc_feature (960838)..(960839): n is a or c or g or t.
  misc_feature (960860)..(960861): n is a or c or g or t.
  misc_feature (960872)..(960873): n is a or c or g or t.
  misc_feature (960879)..(960879): n is a or c or g or t.
  misc_feature (960890)..(960890): n is a or c or g or t.
  misc_feature (1250239)..(1250239): n is a or c or g or t.
  misc_feature (1302432)..(1302434): n is a or c or g or t.
  misc_feature (1302471)..(1302471): n is a or c or g or t.
  misc_feature (1302488)..(1302488): n is a or c or g or t.
  misc_feature (1674836)..(1674836): n is a or c or g or t.
MEAKGGYWGKILRVNLTTKEVKVEPLPEEFPRKYLGGVGFGTRVLYEEVPKGADPLGPENKMIITPGLFVDTGIGTGSKTAFNFKSPLTGGYGRAMAGAELGVQLKRAGYDMLIIEGQSEEPVLLVINDDEVKIVPADAYWGLTTGEARSKAKEEYPGYATAFIGPAGERLSLISIIETDERQAARGGPGAVLGSKKLKGILVKGSKKVPIADPEKLRELIKKWALIFKDHPATKADMEYGSGEFLDWMNRERGTFPVRNWQMGFFKKAYEKAKEEGREHIGIDPYFWAPKYRAGRRPCPLCNKPCSQYVKVESKKWGTFMVDGPEYETLYSFGGVLEIDDFETVAYLNYLADQYGLDTISAGVTIAWAMEAYERGLLTKEDTDGIELTFGNGEAAVEALRKMAYREGNLGKLLADGVKRASERLGKESWKFAMHVKGMEPPAYDVRGIKGMALAFAVSVRGADHLTAGAYGTELVGRWWKFDGVDRTKGENKGFEIAFHENLMAIYDATGTCKFSRHMYFLEGFPELIEAVTGMNIGEAELMVIGERIMNIARAFNVREGFSRKDDTLPYRIMWEPIPEGVSKGLHVPPWELDRMLDEYYQARGWSRDGIPTKAKLIALDLPDIAEDIGAGI

SEQ ID NO: 1829 - protein, 106 aa, Thermococcus kodakaraensis KOD1
  misc_feature (321437)..(321437): n is a or c or g or t.
  misc_feature (527833)..(527833): n is a or c or g or t.
  misc_feature (527901)..(527901): n is a or c or g or t.
  misc_feature (527978)..(527978): n is a or c or g or t.
  misc_feature (960838)..(960839): n is a or c or g or t.
  misc_feature (960860)..(960861): n is a or c or g or t.
  misc_feature (960872)..(960873): n is a or c or g or t.
  misc_feature (960879)..(960879): n is a or c or g or t.
  misc_feature (960890)..(960890): n is a or c or g or t.
  misc_feature (1250239)..(1250239): n is a or c or g or t.
  misc_feature (1302432)..(1302434): n is a or c or g or t.
  misc_feature (1302471)..(1302471): n is a or c or g or t.
  misc_feature (1302488)..(1302488): n is a or c or g or t.
  misc_feature (1674836)..(1674836): n is a or c or g or t.
MISTLLLTIYGLMFMAYYYRTGSEVYLAFSLFALALAYGTGKGNRTAVKIALVFAGLEFLMALFYLISGALLYAVDAAMSFFIIHDVMGYIGKVYQEEKEETPEQL

SEQ ID NO: 1830 - protein, 396 aa, Thermococcus kodakaraensis KOD1
  misc_feature (321437)..(321437): n is a or c or g or t.
  misc_feature (527833)..(527833): n is a or c or g or t.
  misc_feature (527901)..(527901): n is a or c or g or t.
  misc_feature (527978)..(527978): n is a or c or g or t.
  misc_feature (960838)..(960839): n is a or c or g or t.
  misc_feature (960860)..(960861): n is a or c or g or t.
  misc_feature (960872)..(960873): n is a or c or g or t.
  misc_feature (960879)..(960879): n is a or c or g or t.
  misc_feature (960890)..(960890): n is a or c or g or t.
  misc_feature (1250239)..(1250239): n is a or c or g or t.
  misc_feature (1302432)..(1302434): n is a or c or g or t.
  misc_feature (1302471)..(1302471): n is a or c or g or t.
  misc_feature (1302488)..(1302488): n is a or c or g or t.
  misc_feature (1674836)..(1674836): n is a or c or g or t.
VPAKIGLEVNASKEVRGGEVVQVVLKVRNEYESPIKIFDVKISPLPGMEIRPVSQLPITIDPHDQAILKYNISTPYAYREGFVSVIVHYTLGTSRGTSITSFPLKVIWKPWEASREDLLRAYGEYYNILRENRIVDGYWEDKFNSTSAFEASFFKPIATAIVENASSEYDAALKLYQWINALYPLSENTTTLDPGRIFRKEAISPTEEQILLTAFLRSLNIPARVVSLFDGDDCTLRPITEFYTADGWYIVDVKHSFIGTLDEYIASPYFPRIYQTISQENYRIVAQMPEDAYLHEHEDVTADFTVNLDSRIYGIIRKRLHPQLVSKLDMVLAGLSEEERLYALFLFASAPNDELNIVLSTKDVDTIQKTIKALYEFYWDVPWKDDFSAYWEILRG

SEQ ID NO: 1831 - protein, 192 aa, Thermococcus kodakaraensis KOD1
  misc_feature (321437)..(321437): n is a or c or g or t.
  misc_feature (527833)..(527833): n is a or c or g or t.
  misc_feature (527901)..(527901): n is a or c or g or t.
  misc_feature (527978)..(527978): n is a or c or g or t.
  misc_feature (960838)..(960839): n is a or c or g or t.
  misc_feature (960860)..(960861): n is a or c or g or t.
  misc_feature (960872)..(960873): n is a or c or g or t.
  misc_feature (960879)..(960879): n is a or c or g or t.
  misc_feature (960890)..(960890): n is a or c or g or t.
  misc_feature (1250239)..(1250239): n is a or c or g or t.
  misc_feature (1302432)..(1302434): n is a or c or g or t.
  misc_feature (1302471)..(1302471): n is a or c or g or t.
  misc_feature (1302488)..(1302488): n is a or c or g or t.
  misc_feature (1674836)..(1674836): n is a or c or g or t.
VAEMLNRYRENVKGYLEAIVKPLAKAGVTPNTITFIGLLISLLGAYLFYLQRPRLAAVILLIGSAIDALDGTLARMTGKTSRFGAFLDSTFDRISDGAVLFGIALGNLADWRLTFLTFMGAYLVSYERCRAELAGSGTLAVGIAERAERLLILMAFSLAGAEYVKWGVYIVGVLAWITVFQRMWAAYQRLKE

SEQ ID NO: 1832 - protein, 400 aa, Thermococcus kodakaraensis KOD1
  misc_feature (321437)..(321437): n is a or c or g or t.
  misc_feature (527833)..(527833): n is a or c or g or t.
  misc_feature (527901)..(527901): n is a or c or g or t.
  misc_feature (527978)..(527978): n is a or c or g or t.
  misc_feature (960838)..(960839): n is a or c or g or t.
  misc_feature (960860)..(960861): n is a or c or g or t.
  misc_feature (960872)..(960873): n is a or c or g or t.
  misc_feature (960879)..(960879): n is a or c or g or t.
  misc_feature (960890)..(960890): n is a or c or g or t.
  misc_feature (1250239)..(1250239): n is a or c or g or t.
  misc_feature (1302432)..(1302434): n is a or c or g or t.
  misc_feature (1302471)..(1302471): n is a or c or g or t.
  misc_feature (1302488)..(1302488): n is a or c or g or t.
  misc_feature (1674836)..(1674836): n is a or c or g or t.
MELIPLLMGLLTGILTSYTDIKTGFVFDVHAFPTLQLIGKLLGWEEEEEDVGLPRWIERIIIPSAEIGILYYLYLGLKSGDVLLALSGLIGLFVGFGLGLFLYYIGAWASGDVVILAAFSALLPLAPPTAKIVPPYGDGYPFYPVAILFNSILAVFPFIIAYALGVLVVRKETEDIKRVFTEGIRTTIEATLWIMFGIAVTALLNLNRPLLGLLVTILAFPIFLRYRTVGDILGIAGVLYLTYLQPDTTLFALLKVLATIYAVKVLLSTAKILRGKVLVEEVPVEELHEWDILGETIHELNGEVKREREGTIERFKRALSTWDFSEIRPKVGRVVASPTAEGLTKEQIEELKKLVEEGKLENRFLRKKAMPFAPAIFLGFLISYFWGDIFWWLELKMMGL

SEQ ID NO: 1833 - protein, 132 aa, Thermococcus kodakaraensis KOD1
  misc_feature (321437)..(321437): n is a or c or g or t.
  misc_feature (527833)..(527833): n is a or c or g or t.
  misc_feature (527901)..(527901): n is a or c or g or t.
  misc_feature (527978)..(527978): n is a or c or g or t.
  misc_feature (960838)..(960839): n is a or c or g or t.
  misc_feature (960860)..(960861): n is a or c or g or t.
  misc_feature (960872)..(960873): n is a or c or g or t.
  misc_feature (960879)..(960879): n is a or c or g or t.
  misc_feature (960890)..(960890): n is a or c or g or t.
  misc_feature (1250239)..(1250239): n is a or c or g or t.
  misc_feature (1302432)..(1302434): n is a or c or g or t.
  misc_feature (1302471)..(1302471): n is a or c or g or t.
  misc_feature (1302488)..(1302488): n is a or c or g or t.
  misc_feature (1674836)..(1674836): n is a or c or g or t.
MGKKDIRRKEQREKKRIARERVETLFTLAERVFPYSPELANRYVEIALSVQQKAKIRMPRKWKRRYCKKCHSFLVPGVNARVRLRDKPYPHVVITCLNCGNIMRYPYLREKKARRKYASKSTENGNGPDWTS

SEQ ID NO: 1834 - protein, 297 aa, Thermococcus kodakaraensis KOD1
  misc_feature (321437)..(321437): n is a or c or g or t.
  misc_feature (527833)..(527833): n is a or c or g or t.
  misc_feature (527901)..(527901): n is a or c or g or t.
  misc_feature (527978)..(527978): n is a or c or g or t.
  misc_feature (960838)..(960839): n is a or c or g or t.
  misc_feature (960860)..(960861): n is a or c or g or t.
  misc_feature (960872)..(960873): n is a or c or g or t.
  misc_feature (960879)..(960879): n is a or c or g or t.
  misc_feature (960890)..(960890): n is a or c or g or t.
  misc_feature (1250239)..(1250239): n is a or c or g or t.
  misc_feature (1302432)..(1302434): n is a or c or g or t.
  misc_feature (1302471)..(1302471): n is a or c or g or t.
  misc_feature (1302488)..(1302488): n is a or c or g or t.
  misc_feature (1674836)..(1674836): n is a or c or g or t.
MEVTCPVCSATFKVPDTVTVATCPYCGATFKVESGEKVGEHFFFSPMREDPAGKLLKFLSRQYGAPADIVDARVTKKELHWVPVYFFYLHGRDKYKETVEEVRFLGIPAGSPFKTLLMNYPFPVRGKKFFDEAIVKKGKYYEPEMPREKAEEIARSHITTALQQEVREESARTGEFELEVVFQGLVHYPVWEVHYEYDGQSFVNFVDGTDGRVIRAEYPLMSEARKRTTLLGIGLIGAGAVLGIIASAYAGTVWGLIGGLVGGGAGAAGVFSKGSVSKRVVSEVMGIKKGNTYFMPV

SEQ ID NO: 1835 - protein, 164 aa, Thermococcus kodakaraensis KOD1
  misc_feature (321437)..(321437): n is a or c or g or t.
  misc_feature (527833)..(527833): n is a or c or g or t.
  misc_feature (527901)..(527901): n is a or c or g or t.
  misc_feature (527978)..(527978): n is a or c or g or t.
  misc_feature (960838)..(960839): n is a or c or g or t.
  misc_feature (960860)..(960861): n is a or c or g or t.
  misc_feature (960872)..(960873): n is a or c or g or t.
  misc_feature (960879)..(960879): n is a or c or g or t.
  misc_feature (960890)..(960890): n is a or c or g or t.
  misc_feature (1250239)..(1250239): n is a or c or g or t.
  misc_feature (1302432)..(1302434): n is a or c or g or t.
  misc_feature (1302471)..(1302471): n is a or c or g or t.
  misc_feature (1302488)..(1302488): n is a or c or g or t.
  misc_feature (1674836)..(1674836): n is a or c or g or t.
MGKETSIWEKLELVVPGFHGYKKKELLREDDRLVRAKVAEILAGARRELERALQRCAMVNCNMLMAIEDMRKRLIMLEGKVKHAEAGYAGFFDRVKIKEKELEKLIEYDAKMIELAEGIRDKAGAISGAVADPQRLGGEVFALDDMLRNFEEVLEGRSAILRGE

SEQ ID NO: 1836 - protein, 149 aa, Thermococcus kodakaraensis KOD1
  misc_feature (321437)..(321437): n is a or c or g or t.
  misc_feature (527833)..(527833): n is a or c or g or t.
  misc_feature (527901)..(527901): n is a or c or g or t.
  misc_feature (527978)..(527978): n is a or c or g or t.
  misc_feature (960838)..(960839): n is a or c or g or t.
  misc_feature (960860)..(960861): n is a or c or g or t.
  misc_feature (960872)..(960873): n is a or c or g or t.
  misc_feature (960879)..(960879): n is a or c or g or t.
  misc_feature (960890)..(960890): n is a or c or g or t.
  misc_feature (1250239)..(1250239): n is a or c or g or t.
  misc_feature (1302432)..(1302434): n is a or c or g or t.
  misc_feature (1302471)..(1302471): n is a or c or g or t.
  misc_feature (1302488)..(1302488): n is a or c or g or t.
  misc_feature (1674836)..(1674836): n is a or c or g or t.
VGRTQAGAVGVMRFIDANVFIYAFLRPKKEPPENVRMMKEVAKEILKRVSEGEEVVTTVVHLSEVANVVESRAGKKRAAEILLTLLTMENLKVLDVSYGDYLKATLIAEEKNLGINDALAYVKMKEEGIGEIYTFDRDFEKLDIRVVLE

SEQ ID NO: 1837 - protein, 79 aa, Thermococcus kodakaraensis KOD1
  misc_feature (321437)..(321437): n is a or c or g or t.
  misc_feature (527833)..(527833): n is a or c or g or t.
  misc_feature (527901)..(527901): n is a or c or g or t.
  misc_feature (527978)..(527978): n is a or c or g or t.
  misc_feature (960838)..(960839): n is a or c or g or t.
  misc_feature (960860)..(960861): n is a or c or g or t.
  misc_feature (960872)..(960873): n is a or c or g or t.
  misc_feature (960879)..(960879): n is a or c or g or t.
  misc_feature (960890)..(960890): n is a or c or g or t.
  misc_feature (1250239)..(1250239): n is a or c or g or t.
  misc_feature (1302432)..(1302434): n is a or c or g or t.
  misc_feature (1302471)..(1302471): n is a or c or g or t.
  misc_feature (1302488)..(1302488): n is a or c or g or t.
  misc_feature (1674836)..(1674836): n is a or c or g or t.
VLFSFFGKSTVTRELVFLVSGRLISPEFALEELHEHRDEVLKKAKIGEKEFEEILSVLKEHVIFVNEGFYAEFIPLALE

SEQ ID NO: 1838 - DNA, 2089378 bp, Thermococcus kodakaraensis KOD1; identical to SEQ ID NO: 1087
  CDS (810)..(2162): tRNA and rRNA cytosine-C5-methylases
  CDS (4062)..(5321): Uncharacterized ACR
  CDS (19194)..(19550): Uncharacterized ACR
  CDS (25164)..(25766): Transcriptional regulator
  CDS (26412)..(26930): PUA domain (predicted RNA-binding domain)
  CDS (30723)..(31901): PLP-dependent aminotransferases
  CDS (31911)..(32174): Predicted membrane protein
  CDS (32232)..(33386)
  CDS (47646)..(48581): Predicted serine/threonine protein kinases
  CDS (69972)..(70196): Regulators of stationary/sporulation gene expression
  CDS (86358)..(88145): Predicted ATPase
  CDS (92316)..(93647): Uncharacterized ArCR
  CDS (93684)..(94697): ABC-type cobalamin/Fe3+-siderophores transport systems
  CDS (100530)..(101843): Uncharacterized ATPases of the AAA superfamily
  CDS (110385)..(110981): Dephospho-CoA kinase
  CDS (114021)..(115079): Uncharacterized BCR
  CDS (131172)..(131981): Glutamate-1-semialdehyde aminotransferase
  CDS (165408)..(166001): Uracil-DNA glycosylase
  CDS (182280)..(183044): Transcriptional regulator
  CDS (193686)..(194156): Transcriptional regulators
  CDS (208581)..(209114): Uncharacterized ACR
  CDS (231792)..(233450): Predicted phosphohydrolases
  CDS (234771)..(235445): Phosphate transport regulator (distant homolog of PhoU)
  CDS (257733)..(258302): Uncharacterized ArCR
  CDS (260970)..(261815): Universal stress protein UspA and related nucleotide-binding prot eins
  CDS (263754)..(264716): Sugar kinases
  CDS (265596)..(265676)
  CDS (267537)..(267719): DNA primase (bacterial type)
  CDS (274734)..(275237): Uncharacterized ACR
  CDS (275868)..(276860): Tellurite resistance protein and related permeases
  CDS (284331)..(284807): Ni
  CDS (288072)..(288692): Enolase
  CDS (292224)..(293249): Hydrogenase maturation factor
  CDS (294555)..(294857): Uncharacterized ACR
  CDS (305550)..(306512): Phosphate/sulphate permeases
  CDS (316659)..(317234): Tartrate dehydratase beta subunit/Fumarate hydratase class I
  CDS (320028)..(321107): Replication factor A large subunit and related ssDNA-binding prot eins
  misc_feature (321437)..(321437): n is a or c or g or t.
  CDS (326820)..(327212): Ribosomal protein S6E (S10)
  CDS (332454)..(333245): Uncharacterized ACR
  CDS (336585)..(337661): Small-conductance mechanosensitive channel
  CDS (339447)..(339623): Sec-independent protein secretion pathway component TatC
  CDS (345135)..(345440): NAD-dependent protein deacetylases
  CDS (350964)..(351758): Ferrous ion uptake system protein FeoB (predicted GTPase)
  CDS (362673)..(363521): Lipoate-protein ligase A
  CDS (383064)..(384011): Purine nucleoside phosphorylase
  CDS (384237)..(384389): Uncharacterized membrane protein
  CDS (384408)..(385154): Putative glycerate kinase
  CDS (387885)..(389168): Cytosine deaminase and related metal-dependent hydrolases COG0402 SsnA
  CDS (389205)..(389756): Uncharacterized ACR related to the C-terminal domain of histone m acroH2A1
  CDS (396936)..(398375): Acyl-CoA synthetase (NDP forming)
  CDS (426795)..(427859): Predicted membrane protein
  CDS (430521)..(430745): Signal peptidase
  CDS (432402)..(433454): Uncharacterized ACR
  CDS (444714)..(445343): Pyrrolidone-carboxylate peptidase (N-terminal pyroglutamyl peptid ase)
  CDS (445833)..(447797): Uncharacterized ACR
  CDS (450705)..(452042)
  CDS (458673)..(458741)
  CDS (474066)..(476513): ABC-type dipeptide/oligopeptide/nickel transport systems
  CDS (476694)..(477743): ABC-type dipeptide/oligopeptide/nickel transport systems
  CDS (481407)..(481715): Cytosine/uracil/thiamine/allantoin permeases COG1953 FUI1
  CDS (490869)..(491627): RecA-superfamily ATPases implicated in signal transduction
  CDS (502803)..(503732): Metal-dependent hydrolases of the beta-lactamase superfamily I
  misc_feature (52783)..(527833): n is a or c or g or t.
  misc_feature (527901)..(527901): n is a or c or g or t.
  misc_feature (527978)..(527978): n is a or c or g or t.
  CDS (530871)..(531962): ABC-type dipeptide/oligopeptide/nickel transport system
  CDS (533898)..(536270): Beta-galactosidase
  CDS (537924)..(539183): Sensory transduction histidine kinases
  CDS (539856)..(540008): Cobyric acid synthase
  CDS (562929)..(563312): Predicted glycosyltransferases
  CDS (577794)..(580094): Uncharacterized membrane protein
  CDS (597153)..(597686): Uncharacterized ArCR
  CDS (607509)..(607625): Cysteine synthase
  CDS (613395)..(614306): Predicted hydrolase of the metallo-beta-lactamase superfamily
  CDS (625095)..(626273): Cell division GTPase
  CDS (640851)..(641024): Uncharacterized ACR
  CDS (641079)..(641615): Amidases related to nicotinamidase
  CDS (643377)..(644090): ABC-type multidrug transport system
  CDS (650103)..(650876): RNA-binding protein Rrp4 and related proteins (contain S1 domain and KH domain)
  CDS (652443)..(652733): Predicted membrane protein
  CDS (652785)..(653198): Uncharacterized ACR
  CDS (665784)..(666638): Aspartokinases
  CDS (691410)..(691850): S-adenosylmethionine decarboxylase
  CDS (699396)..(700331): ABC-type multidrug transport system
  CDS (703464)..(704027): Uncharacterized BCR
  CDS (708933)..(709397): Flagellar basal body L-ring protein
  CDS (718389)..(718751): Phosphatidylserine/phosphatidylglycerophosphate/cardioli pin synt hases and related enzymes
  CDS (725448)..(726368): Predicted ATPase of the PP-loop superfamily implicated in cell cy cle control
  CDS (729945)..(730937): Beta-galactosidase
  CDS (731028)..(731861): Predicted ATPase of the PP-loop superfamily implicated in cell cy cle control
  CDS (736872)..(738056): ATP-dependent DNA ligase
  CDS (738120)..(739496): Predicted ATPase of the AAA superfamily
  CDS (740034)..(740888): Uncharacterized ACR
  CDS (742980)..(743708): Ribosomal protein L2
  CDS (744126)..(744596): Ribosomal protein L22
  CDS (745218)..(745418): Ribosomal protein L29
  CDS (745425)..(745721): Translation initiation factor (SUI1)
  CDS (746766)..(747131): Ribosomal protein L24
  CDS (747876)..(748427): Ribosomal protein L5
  CDS (748611)..(749003): Ribosomal protein S8
  CDS (749967)..(750422): Ribosomal protein L19E
  CDS (751035)..(751742): Ribosomal protein S5
  CDS (754242)..(754841): Archaeal adenylate kinase
  CDS (755379)..(755672): Ribosomal protein L34E
  CDS (757371)..(757601): Uncharacterized ACR
  CDS (760869)..(761411): Ribosomal protein S4 and related proteins
  CDS (763578)..(764009): Ribosomal protein S9
  CDS (766374)..(766538): Ribosomal protein L40E
  CDS (766977)..(767276): Uncharacterized ACR
  CDS (773499)..(773717): Ribosomal protein L11 methylase
  CDS (776061)..(777413): Uncharacterized NAD(FAD)-dependent dehydrogenases
  CDS (783129)..(784142): Mevalonate kinase
  CDS (786444)..(787619): L-lactate dehydrogenase (FMN-dependent) and related alpha-hydroxy acid dehydrogenases
  CDS (808791)..(809420): Ribosomal protein L15E
  CDS (811077)..(812651): ABC-type multidrug/protein/lipid transport system
  CDS (813243)..(813917): Ribonuclease P subunit Rpp30
  CDS (815220)..(816278)
  CDS (817197)..(818216): Methionine synthase II (cobalamin-independent)
  CDS (819336)..(820223): Homoserine kinase
  CDS (824304)..(824720): Predicted transcriptional regulators containing the CopG/Arc/MetJ DNA-binding domain and a metal-binding domain
  CDS (829206)..(829523): Nitrogen regulatory protein PII
  CDS (835590)..(835790): Proteasome protease subunit
  CDS (835800)..(837746): Predicted metal-dependent RNase
  CDS (840669)..(842009): L-fucose isomerase and related proteins
  CDS (842319)..(843137): Uncharacterized ArCR
  CDS (845106)..(845603): Ribosomal protein L11
  CDS (849384)..(849587): Histones H3 and H4
  CDS (851400)..(852794): DNA primase (bacterial type)
  CDS (867177)..(867875): Glycerophosphoryl diester phosphodiesterase
  CDS (874164)..(875012): Predicted dehydrogenase
  CDS (882303)..(883598): Flagellar biosynthesis/type III secretory pathway ATPase
  CDS (885120)..(886637): Glycine cleavage system protein P (pyridoxal-binding)
  CDS (889842)..(890168): Chromosome segregation ATPases
  CDS (899316)..(899438): ABC-type sugar transport systems
  CDS (899472)..(900416): Glycine cleavage system protein P (pyridoxal-binding)
  CDS (901725)..(902006)
  CDS (904647)..(904943): Translation initiation factor 2 (GTPase)
  CDS (906705)..(907097): Cobalamin biosynthesis protein CbiM
  CDS (908772)..(910043): ABC-type Na+ efflux pump
  CDS (916353)..(917114): Predicted SAM-dependent methyltransferase involved in tRNA-Met ma turation
  CDS (918354)..(919802): NADPH-dependent glutamate synthase beta chain and related oxidore ductases COG0493 GltD
  CDS (920721)..(921875): Predicted glycosyltransferases
  CDS (927744)..(928079): Uncharacterized ATPases of the AAA superfamily
  CDS (931542)..(931754): Ribosomal protein S28E/S33
  CDS (958902)..(960344): Na+-driven multidrug efflux pump
  misc_feature (960838)..(960839): n is a or c or g or t.
  misc_feature (960860)..(960861): n is a or c or g or t.
  misc_feature (960872)..(960873): n is a or c or g or t.
  misc_feature (960879)..(960879): n is a or c or g or t.
  misc_feature (960890)..(960890): n is a or c or g or t.
  CDS (963741)..(964208): Transcriptional regulators
  CDS (966858)..(967970): 5'-3' exonuclease (including N-terminal domain of PolI)
  CDS (976377)..(976754): Transcriptional regulator of a riboflavin/FAD biosynthetic operon
  CDS (977298)..(977516): Uncharacterized ACR
  CDS (979125)..(980819): Uncharacterized archaeal coiled-coil domain
  CDS (981363)..(981854): Permeases of the drug/metabolite transporter (DMT) superfamily CO G0697 RhaT
  CDS (994251)..(995411): Uncharacterized ACR
  CDS (995421)..(995822): Uncharacterized ACR
  CDS (995856)..(997172): Predicted membrane-associated Zn-dependent proteases 1
  CDS (1000866)..(1002122): Peptide chain release factor eRF1
  CDS (1003662)..(1004738): Predicted ATPase of the AAA superfamily
  CDS (1006599)..(1007015): Lipoate-protein ligase A
  CDS (1008906)..(1010177): UDP-N-acetyl-D-mannosaminuronate dehydrogenase
  CDS (1015035)..(1015427): Multisubunit Na+/H+ antiporter
  CDS (1016415)..(1016759): Multisubunit Na+/H+ antiporter
  CDS (1030071)..(1030331): Predicted glycosyltransferases
  CDS (1031076)..(1031546): Uncharacterized ACR
  CDS (1031997)..(1032986): Pentose-5-phosphate-3-epimerase
  CDS (1037667)..(1038071): Uncharacterized ArCR
  CDS (1043310)..(1044569): Nucleoside-diphosphate-sugar pyrophosphorylases involved in lipop olysaccharide biosynthesis/translation initiation factor eIF2B su bunits COG1208 GCD1
  CDS (1051149)..(1051988): ABC-type cobalt transport system
  CDS (1061799)..(1062395): Predicted RNA-binding protein (consists of S1 domain and a Zn-rib bon domain)
  CDS (1063002)..(1063295): DNA-directed RNA polymerase
  CDS (1068408)..(1068557): Predicted hydrolase of alkaline phosphatase superfamily
  CDS (1077429)..(1078367): ABC-type multidrug transport system
  CDS (1078422)..(1079189): ABC-type transport system involved in multi-copper enzyme maturat ion
  CDS (1081488)..(1083176): Methylmalonyl-CoA mutase
  CDS (1083291)..(1083911): Isopropylmalate/homocitrate/citramalate synthases
  CDS (1086138)..(1087376): 3-phosphoglycerate kinase
  CDS (1090113)..(1090853): Predicted EndoIII-related endonuclease
  CDS (1096368)..(1097342): Predicted Fe-S oxidoreductases
  CDS (1103979)..(1105019): Pyruvate:ferredoxin oxidoreductase and related 2-oxoacid:ferredox in oxidoreductases
  CDS (1110672)..(1111616): Metal-dependent hydrolases of the beta-lactamase superfamily III
  CDS (1112325)..(1112507): Transcription terminator
  CDS (1132845)..(1133003): Uncharacterized BCR
  CDS (1135188)..(1135883): Thiol-disulfide isomerase and thioredoxins COG0526 TrxA
  CDS (1136082)..(1136330): DNA-directed RNA polymerase
  CDS (1142439)..(1143623): DNA-directed RNA polymerase beta' subunit/160 kD subunit (split g ene in archaea and Syn)
  CDS (1143942)..(1144382): Transcription terminator
  CDS (1144842)..(1145489): Ribosomal protein S7
  CDS (1146072)..(1146464): SAM-dependent methyltransferases related to tRNA (uracil-5-)-meth yltransferase
  CDS (1152714)..(1153865): Predicted Fe-S oxidoreductases
  CDS (1164564)..(1165262): RecA-superfamily ATPases implicated in signal transduction
  CDS (1170207)..(1170659): Uncharacterized ACR
  CDS (1175190)..(1176488): Uncharacterized ACR
  CDS (1184823)..(1185251): Uncharacterized ACR
  CDS (1189374)..(1190222): Uncharacterized protein associated with dipeptide transport
  CDS (1206453)..(1206566)
  CDS (1212522)..(1213541): Adenylosuccinate synthase
  CDS (1232580)..(1232741): ABC-type spermidine/putrescine transport system
  CDS (1240278)..(1240391)
  CDS (1240494)..(1240604): Predicted alternative tryptophan synthase beta-subunit (paralog o f TrpB)
  CDS (1249740)..(1251731): Ferrous ion uptake system protein FeoB (predicted GTPase)
  misc_feature (1250239)..(1250239): n is a or c or g or t.
  CDS (1251777)..(1252043): Predicted ATPase involved in replication control
  CDS (1260474)..(1261943): Asparagine synthase (glutamine-hydrolyzing)
  CDS (1261965)..(1262999): Predicted glycosyltransferases
  CDS (1263084)..(1264112): Putative translation factor (SUA5)
  CDS (1264182)..(1265363): TPR-repeat-containing proteins
  CDS (1281963)..(1283354): DNA or RNA helicases of superfamily II
  CDS (1288860)..(1288928)
  CDS (1288953)..(1289054): ATPase components of ABC transporters with duplicated ATPase doma ins
  CDS (1291062)..(1291826): ATPases involved in chromosome partitioning
  CDS (1291842)..(1293068): Hydroxymethylglutaryl-CoA reductase
  CDS (1299918)..(1300061): UDP-N-acetylmuramyl pentapeptide phosphotransferase/UDP-N- acetyl glucosamine-1-phosphate transferase
  CDS (1301769)..(1302095): Ribosomal protein L21E
  misc_feature (1302432)..(1302434): n is a or c or g or t.
  misc_feature (1302471)..(1302471): n is a or c or g or t.
  misc_feature (1302488)..(1302488): n is a or c or g or t.
  CDS (1302540)..(1303160): Predicted RNA-binding protein
  CDS (1304451)..(1306280): Uncharacterized Fe-S oxidoreductases
  CDS (1324062)..(1324178)
  CDS (1327704)..(1328690): ATP-dependent protease
  CDS (1330920)..(1331666): Predicted alternative thymidylate synthase
  CDS (1333968)..(1335212): Predicted phosphoglycerate mutase
  CDS (1339935)..(1340348): Phosphatidylglycerophosphatase A
  CDS (1349682)..(1351556): Aldehyde:ferredoxin oxidoreductase
  CDS (1352232)..(1353413): Arsenite efflux pump ACR3 and related permeases
  CDS (1367952)..(1368689)
  CDS (1374423)..(1375685): Uncharacterized flavoproteins
  CDS (1376187)..(1376933): Adenylate kinase and related kinases
  CDS (1400931)..(1401740): Predicted membrane proteins
  CDS (1404204)..(1404680): Adenine-specific DNA methylase
  CDS (1409565)..(1410278): Sugar fermentation stimulation protein (uncharacterized)
  CDS (1410315)..(1411235): Predicted transcriptional regulators
  CDS (1422762)..(1423046): Uncharacterized ACR
  CDS (1430736)..(1431656): Phosphate/sulphate permeases
  CDS (1431690)..(1433441): Queuine/archaeosine tRNA-ribosyltransferase
  CDS (1435830)..(1437035): Cytosine deaminase and related metal-dependent hydrolases COG0402 SsnA
  CDS (1447455)..(1448174): Biotin-(acetyl-CoA carboxylase) ligase
  CDS (1448982)..(1449752): ABC-type cobalt transport system
  CDS (1458354)..(1459694): Predicted membrane components of an uncharacterized iron-regulate d ABC-type transporter SufB
  CDS (1461525)..(1462469): ABC-type multidrug transport system
  CDS (1469487)..(1471505): Ferrous ion uptake system protein FeoB (predicted GTPase)
  CDS (1481700)..(1482632): MinD superfamily P-loop ATPase containing an inserted ferredoxin domain
  CDS (1489281)..(1489982): ABC-type multidrug transport system
  CDS (1531182)..(1531253)
  CDS (1534644)..(1535633): Predicted dehydrogenases and related proteins
  CDS (1554015)..(1554461): Chemotaxis signal transduction protein
  CDS (1562895)..(1563494): Predicted RNA-binding protein homologous to eukaryotic snRNP
  CDS (1566750)..(1568684): Ankyrin repeat proteins
  CDS (1571097)..(1571573): Predicted secreted acid phosphatase
  CDS (1573587)..(1573835): Ribosomal protein L3
  CDS (1575117)..(1575668): Diadenosine tetraphosphate (Ap4A) hydrolase and other HIT family hydrolases COG0537 Hit
  CDS (1586586)..(1586831): Sugar (pentulose and hexulose) kinases
  CDS (1610328)..(1611407): Translation initiation factor eIF-2B alpha subunit
  CDS (1615233)..(1616687): Prolyl-tRNA synthetase
  CDS (1627443)..(1628711): HD superfamily phosphohydrolases
  CDS (1653078)..(1653599): Adenylate cyclase
  CDS (1657119)..(1658495): Predicted Zn-dependent proteases and their inactivated homologs
  CDS (1658745)..(1658984): rRNA methylases
  CDS (1658988)..(1660313): Predicted Zn-dependent proteases and their inactivated homologs
  CDS (1665348)..(1666502): Metal-dependent amidase/aminoacylase/carboxypeptidase
  misc_feature (1674836)..(1674836): n is a or c or g or t.
  CDS (1683747)..(1683959): Predicted transcriptional regulator
  CDS (1705539)..(1706528): Uncharacterized ACR
  CDS (1706703)..(1707068): Histidyl-tRNA synthetase
  CDS (1708269)..(1709012): Serine/threonine protein kinases
  CDS (1712607)..(1713080): Predicted transcriptional regulator
  CDS (1720089)..(1721141): FKBP-type peptidyl-prolyl cis-trans isomerases 2
  CDS (1730049)..(1731344): Thiamine biosynthesis protein ThiC
  CDS (1732926)..(1733522): Uncharacterized ArCR
  CDS (1743756)..(1743812)
  CDS (1779972)..(1780448): Predicted membrane protein
  CDS (1785612)..(1786073): Uncharacterized ACR
  CDS (1792239)..(1792751): Excinuclease ATPase subunit
  CDS (1795785)..(1795868)
  CDS (1798221)..(1798439): 1
  CDS (1799430)..(1799888): Predicted nucleic acid-binding protein
  CDS (1802886)..(1803662): Uncharacterized proteins
  CDS (1804086)..(1804274): Predicted nucleic acid-binding protein
  CDS (1804962)..(1805957): Allophanate hydrolase subunit 2
  CDS (1815321)..(1816853): Dihydropteroate synthase
  CDS (1820181)..(1821269): Acetylornithine deacetylase/Succinyl-diaminopimelate desuccinylas e and related deacylases
  CDS (1821303)..(1822376): HD superfamily phosphohydrolases
  CDS (1822401)..(1822682)
  CDS (1824213)..(1825313): Translation elongation and release factors (GTPases)
  CDS (1825548)..(1826834): GTPases - translation elongation factors COG0050 TufB
  CDS (1832391)..(1834151): Metal-dependent hydrolase
  CDS (1841244)..(1842152): Quinolinate synthase
  CDS (1843038)..(1843139): Tellurite resistance protein and related permeases
  CDS (1843149)..(1843640)
  CDS (1851162)..(1851725): Nitroreductase
  CDS (1851951)..(1853036): Isopropylmalate/homocitrate/citramalate synthases
  CDS (1854651)..(1855694): Isocitrate/isopropylmalate dehydrogenase
  CDS (1855968)..(1856798): Glutathione synthase/Ribosomal protein S6 modification enzyme (gl utaminyl transferase) COG0189 RimK
  CDS (1860231)..(1860668): Acetylornithine deacetylase/Succinyl-diaminopimelate desuccinylas e and related deacylases
  CDS (1862001)..(1862660): Transketolase
  CDS (1864356)..(1865501): 3-dehydroquinate synthetase
  CDS (1868904)..(1869971): Chorismate synthase
  CDS (1870125)..(1870301): Chorismate mutase
  CDS (1871283)..(1872053): Prephenate dehydrogenase
  CDS (1888692)..(1889630): Predicted glycosyltransferases
  CDS (1908090)..(1908350): Uncharacterized ACR
  CDS (1916844)..(1917995): ATP-utilizing enzymes of ATP-grasp superfamily (probably carbolig ases)
  CDS (1919001)..(1920497): Phosphoenolpyruvate synthase/pyruvate phosphate dikinase
  CDS (1926123)..(1927583): IMP dehydrogenase/GMP reductase
  CDS (1927659)..(1928591): GMP synthase - PP-ATPase domain
  CDS (1928634)..(1928852): Acyl-CoA synthetase (NDP forming)
  CDS (1933497)..(1934534): Translation initiation factor eIF-2B delta subunit
  CDS (1935888)..(1936577): Fibrillarin-like rRNA methylase
  CDS (1938504)..(1939679): Acetyl-CoA acetyltransferases
  CDS (1944447)..(1945622): Predicted membrane protein
  CDS (1950702)..(1950857): Methionine aminopeptidase
  CDS (1951206)..(1951901): Uncharacterized BCR
  CDS (1953624)..(1954400): Permeases of the major facilitator superfamily
  CDS (1963221)..(1965446): Archaea-specific RecJ-like exonuclease
  CDS (1965510)..(1965800): Archaea-specific RecJ-like exonuclease
  CDS (1968186)..(1968257)
  CDS (1968426)..(1968899): Uncharacterized ACR
  CDS (1970667)..(1971200): Phosphate/sulphate permeases
  CDS (1980279)..(1980896): Pyruvate:ferredoxin oxidoreductase and related 2-oxoacid:ferredox in oxidoreductases
  CDS (1985946)..(1986392): Uncharacterized ArCR
  CDS (2002239)..(2003045): Diphthamide biosynthesis methyltransferase DPH5
  CDS (2009652)..(2009756)
  CDS (2031102)..(2031779): Predicted helicases
  CDS (2067459)..(2068112): Predicted phosphatases
  CDS (2068191)..(2069195): Polyribonucleotide nucleotidyltransferase (polynucleotide phospho rylase)
  CDS (2070585)..(2071598): Membrane protease subunits
  CDS (2075322)..(2075570): Regulators of stationary/sporulation gene expression
  CDS (2077962)..(2078570): GTPases
  CDS (2080623)..(2081723): Predicted DNA modification methylase

SEQ ID NO: 1839 - protein, 450 aa, Thermococcus kodakaraensis KOD1
  misc_feature (321437)..(321437): n is a or c or g or t.
  misc_feature (52783)..(527833): n is a or c or g or t.
  misc_feature (527901)..(527901): n is a or c or g or t.
  misc_feature (527978)..(527978): n is a or c or g or t.
  misc_feature (960838)..(960839): n is a or c or g or t.
  misc_feature (960860)..(960861): n is a or c or g or t.
  misc_feature (960872)..(960873): n is a or c or g or t.
  misc_feature (960879)..(960879): n is a or c or g or t.
  misc_feature (960890)..(960890): n is a or c or g or t.
  misc_feature (1250239)..(1250239): n is a or c or g or t.
  misc_feature (1302432)..(1302434): n is a or c or g or t.
  misc_feature (1302471)..(1302471): n is a or c or g or t.
  misc_feature (1302488)..(1302488): n is a or c or g or t.
  misc_feature (1674836)..(1674836): n is a or c or g or t.
MELFYRVSFQEVVADALMLVEERELSSKHALERVFKKVAGRDREKARGLAHAYVFEIEKWRAKIDFIINSVLKGSKVEDLDPYLANLLRIGTFEIHFRKVPPALATDSIVRVVKEKFDFSRAKFVNALMHEIEKFDVERALKRLKEKDRIEWLSVRFSHPRWYVEYVINLFGYDEAVRLLLSNNRPQRYYVRANTLKTDIDSLRDYLEENGVRTALTPVPDVLKVLEYKTPVTRLDWYKEGKFVIQDLASAYVAHVLSPEPGERLLDLAAAPGSKTFHAAALMENKGEIVAVDYSYDRLMRMKEKAKVLGVKNVRFVHADGQSFRDKEKFDKIILDAPCSSSGTYRQFPEVKWRFDEAKIKKIISVQRNMLRNAYENLREGGEMTYSTCSIRIDEDEENVLFAINRVGLELLDYPFSWGDRGFLDIGDKVFRAWTHRHDCNSFFIAKLKR

SEQ ID NO: 1840 - protein, 419 aa, Thermococcus kodakaraensis KOD1
  misc_feature (321437)..(321437): n is a or c or g or t.
  misc_feature (52783)..(527833): n is a or c or g or t.
  misc_feature (527901)..(527901): n is a or c or g or t.
  misc_feature (527978)..(527978): n is a or c or g or t.
  misc_feature (960838)..(960839): n is a or c or g or t.
  misc_feature (960860)..(960861): n is a or c or g or t.
  misc_feature (960872)..(960873): n is a or c or g or t.
  misc_feature (960879)..(960879): n is a or c or g or t.
  misc_feature (960890)..(960890): n is a or c or g or t.
  misc_feature (1250239)..(1250239): n is a or c or g or t.
  misc_feature (1302432)..(1302434): n is a or c or g or t.
  misc_feature (1302471)..(1302471): n is a or c or g or t.
  misc_feature (1302488)..(1302488): n is a or c or g or t.
  misc_feature (1674836)..(1674836): n is a or c or g or t.
VIGMDYREFFSQFKHLSEKPGIGGKIKIYPEDFIVIEEPIPSIFEGRKYAIFLLKKRNWETMAAVKEIAKRAGINYREIGFAGTKDRHAVTYQYISVPAEARERVEQVSIRDIELRFVSYGRFIKLGHLLGNRFRIIVRDVSEDAFDRTKEIVRELREKGGFPNYFGYQRFGERRVVNHIIGKLLLQGDFEGAARLFLGAHDGSMEGDEARKNFWETGDVERALEEFPGFLRYERTLLHRYKDTGNWKRAFLSLPLPIMRIFIHAYQSYLFNLYLSRRIEEGLPLNEPLVGDIVVQVKGGIPYRDRTYRVTETNLEFVREKVRKNQAMVSGPLFGFAMRRAKGLPGELEKEILEEEGLSLETFRRLPKPMAEPGGRRELLLRPMGMAYGYIQEEGMCFRFFLPKGTYATSVLREIMKDH

SEQ ID NO: 1841 - protein, 118 aa, Thermococcus kodakaraensis KOD1
  misc_feature (321437)..(321437): n is a or c or g or t.
  misc_feature (52783)..(527833): n is a or c or g or t.
  misc_feature (527901)..(527901): n is a or c or g or t.
  misc_feature (527978)..(527978): n is a or c or g or t.
  misc_feature (960838)..(960839): n is a or c or g or t.
  misc_feature (960860)..(960861): n is a or c or g or t.
  misc_feature (960872)..(960873): n is a or c or g or t.
  misc_feature (960879)..(960879): n is a or c or g or t.
  misc_feature (960890)..(960890): n is a or c or g or t.
  misc_feature (1250239)..(1250239): n is a or c or g or t.
  misc_feature (1302432)..(1302434): n is a or c or g or t.
  misc_feature (1302471)..(1302471): n is a or c or g or t.
  misc_feature (1302488)..(1302488): n is a or c or g or t.
  misc_feature (1674836)..(1674836): n is a or c or g or t.
MRLEYPAFGKIIVDGATYEHDIVLYPSGKVERRKKKISKQKHGTSHKLDPEELKEYLTEDFDVLVVGTGMYGKLSLLPESRELIKGKEVLELPTKKAVEVFNELYGKKKVLGIFHITC

SEQ ID NO: 1842 - protein, 200 aa, Thermococcus kodakaraensis KOD1
  misc_feature (321437)..(321437): n is a or c or g or t.
  misc_feature (52783)..(527833): n is a or c or g or t.
  misc_feature (527901)..(527901): n is a or c or g or t.
  misc_feature (527978)..(527978): n is a or c or g or t.
  misc_feature (960838)..(960839): n is a or c or g or t.
  misc_feature (960860)..(960861): n is a or c or g or t.
  misc_feature (960872)..(960873): n is a or c or g or t.
  misc_feature (960879)..(960879): n is a or c or g or t.
  misc_feature (960890)..(960890): n is a or c or g or t.
  misc_feature (1250239)..(1250239): n is a or c or g or t.
  misc_feature (1302432)..(1302434): n is a or c or g or t.
  misc_feature (1302471)..(1302471): n is a or c or g or t.
  misc_feature (1302488)..(1302488): n is a or c or g or t.
  misc_feature (1674836)..(1674836): n is a or c or g or t.
MSWKRGAYPEFTLEDVIATIFLLREPIGRKAIAETLDIGEGSVRTLLKKLNWIDVIDSAQRGHFLSKTGKKLLERLKGLFSEAHFVGKVDGMPAYAIVVKNPPQFKSIELRDEAIRFFAKGAMILIVKNGEPVFPEDERPLRDTMEELAMNIEEVLNFSDGDLIVVTWAENPSDAMKSAYHVALTLKNDEIPEELKSLVR

SEQ ID NO: 1843 - protein, 172 aa, Thermococcus kodakaraensis KOD1
  misc_feature (321437)..(321437): n is a or c or g or t.
  misc_feature (52783)..(527833): n is a or c or g or t.
  misc_feature (527901)..(527901): n is a or c or g or t.
  misc_feature (527978)..(527978): n is a or c or g or t.
  misc_feature (960838)..(960839): n is a or c or g or t.
  misc_feature (960860)..(960861): n is a or c or g or t.
  misc_feature (960872)..(960873): n is a or c or g or t.
  misc_feature (960879)..(960879): n is a or c or g or t.
  misc_feature (960890)..(960890): n is a or c or g or t.
  misc_feature (1250239)..(1250239): n is a or c or g or t.
  misc_feature (1302432)..(1302434): n is a or c or g or t.
  misc_feature (1302471)..(1302471): n is a or c or g or t.
  misc_feature (1302488)..(1302488): n is a or c or g or t.
  misc_feature (1674836)..(1674836): n is a or c or g or t.
MELKVKHPLSKKEIKEIIREMSEIFGEEIAKKMLNKKDRVEVAEFDKTTEILLVNGKPFFIRRKELVFPLVIALYELSNEEDLRKWPRRVVVDEGAVPYILNGADVMAAGIVDADENINEGDFVFVVEENYGRPLAIGIALMDGRKMKEKPKGKAVKNIHHAKDKIWQVTVG

SEQ ID NO: 1844 - protein, 392 aa, Thermococcus kodakaraensis KOD1
  misc_feature (321437)..(321437): n is a or c or g or t.
  misc_feature (52783)..(527833): n is a or c or g or t.
  misc_feature (527901)..(527901): n is a or c or g or t.
  misc_feature (527978)..(527978): n is a or c or g or t.
  misc_feature (960838)..(960839): n is a or c or g or t.
  misc_feature (960860)..(960861): n is a or c or g or t.
  misc_feature (960872)..(960873): n is a or c or g or t.
  misc_feature (960879)..(960879): n is a or c or g or t.
  misc_feature (960890)..(960890): n is a or c or g or t.
  misc_feature (1250239)..(1250239): n is a or c or g or t.
  misc_feature (1302432)..(1302434): n is a or c or g or t.
  misc_feature (1302471)..(1302471): n is a or c or g or t.
  misc_feature (1302488)..(1302488): n is a or c or g or t.
  misc_feature (1674836)..(1674836): n is a or c or g or t.
MRYKKRKYFMAGRINILQRSKIRELFEKASKMENVISLGIGEPDFDTPEVIKEAAKRAIDEGYTHYTPNAGIPEFREAIAEYYKEFYNVDVDMNNIIVTAGAYEATYLAFESILEQGDDVIIPDPAFVCYVEDAKIAEAGIIRIPLREENKFRIDPDELLEAITKRTRMIVMNYPNNPTGAIMKKDVAKAIADIAQDYNIYILSDEPYEHFLYEGARHHPMIKYAPDNTILANSFSKTFAMTGWRLGFAIAPEQVIRDMIKLHAYVIGNVTSFIQIAGITALRDKRSWEAVERMRQVYDERRKLVLKYLNDMPHITPFRPKGAFYIWAKIDPELDMTSEDFAEWLLENAGVVVIPGTAFGRQGEGWIRISYATEKEKLIEAMERMKEALSKL

SEQ ID NO: 1845 - protein, 87 aa, Thermococcus kodakaraensis KOD1
  misc_feature (321437)..(321437): n is a or c or g or t.
  misc_feature (52783)..(527833): n is a or c or g or t.
  misc_feature (527901)..(527901): n is a or c or g or t.
  misc_feature (527978)..(527978): n is a or c or g or t.
  misc_feature (960838)..(960839): n is a or c or g or t.
  misc_feature (960860)..(960861): n is a or c or g or t.
  misc_feature (960872)..(960873): n is a or c or g or t.
  misc_feature (960879)..(960879): n is a or c or g or t.
  misc_feature (960890)..(960890): n is a or c or g or t.
  misc_feature (1250239)..(1250239): n is a or c or g or t.
  misc_feature (1302432)..(1302434): n is a or c or g or t.
  misc_feature (1302471)..(1302471): n is a or c or g or t.
  misc_feature (1302488)..(1302488): n is a or c or g or t.
  misc_feature (1674836)..(1674836): n is a or c or g or t.
MENLLAVFVSIFLAELGDKTQLATIAFASKYGWKTAFLGAILGLATVNLIGALIGDKIGDVLPIEVIHKGAGVLFIVFGILMLLGKM

SEQ ID NO: 1846 - protein, 384 aa, Thermococcus kodakaraensis KOD1
  misc_feature (321437)..(321437): n is a or c or g or t.
  misc_feature (52783)..(527833): n is a or c or g or t.
  misc_feature (527901)..(527901): n is a or c or g or t.
  misc_feature (527978)..(527978): n is a or c or g or t.
  misc_feature (960838)..(960839): n is a or c or g or t.
  misc_feature (960860)..(960861): n is a or c or g or t.
  misc_feature (960872)..(960873): n is a or c or g or t.
  misc_feature (960879)..(960879): n is a or c or g or t.
  misc_feature (960890)..(960890): n is a or c or g or t.
  misc_feature (1250239)..(1250239): n is a or c or g or t.
  misc_feature (1302432)..(1302434): n is a or c or g or t.
  misc_feature (1302471)..(1302471): n is a or c or g or t.
  misc_feature (1302488)..(1302488): n is a or c or g or t.
  misc_feature (1674836)..(1674836): n is a or c or g or t.
MTAGFGTLSMMGVAKPDIISHFGISNSAYDLQHVAYVFGLFVAFLLGHTKLYEGSFKRSVAIALSWAAIPQLLIPYVGNWYLVVALRFIQGFVVSLVPLFSTQIARFFVAERPFAKGIILSGIFWGGVFGSISARYLVEAVGWKMGFVVTAIIMYAVLLLWWLLVEDFEIIHEKTGSDVNIWKMPFTWVLGLTFFPALWVIFTIVGFSASLGYDLGWTKDQVSNLSTTLNVSKALWSIAMGFVGFQLSKKNTTPRGLFKAIVQVMMISYTIAFIGLILYSKAMLAGNYAMALASVVLVGALQGTGPAFWTSAPATYPKRIYPKASFALGLISNSANAIAPSVTEALASISEKLALAELTLMPLLGILTLVTVSRMRLPVEELGE

SEQ ID NO: 1847 - protein, 311 aa, Thermococcus kodakaraensis KOD1
  misc_feature (321437)..(321437): n is a or c or g or t.
  misc_feature (52783)..(527833): n is a or c or g or t.
  misc_feature (527901)..(527901): n is a or c or g or t.
  misc_feature (527978)..(527978): n is a or c or g or t.
  misc_feature (960838)..(960839): n is a or c or g or t.
  misc_feature (960860)..(960861): n is a or c or g or t.
  misc_feature (960872)..(960873): n is a or c or g or t.
  misc_feature (960879)..(960879): n is a or c or g or t.
  misc_feature (960890)..(960890): n is a or c or g or t.
  misc_feature (1250239)..(1250239): n is a or c or g or t.
  misc_feature (1302432)..(1302434): n is a or c or g or t.
  misc_feature (1302471)..(1302471): n is a or c or g or t.
  misc_feature (1302488)..(1302488): n is a or c or g or t.
  misc_feature (1674836)..(1674836): n is a or c or g or t.
MVSKLLALEAYPSLRDLDFRILRGVELNMRHHRWVPLEDIARFARVDVETASFRLGKLDDWGLVVRRSDIGYIGYQLTIHGYDALAIRALAKKGVIEAISTTQIGVGKDADVYVGITPSGEKVAVKFNRIGGRTASRRAGYHGHVFQDKHHTSWLYVSRLIAKKEHEALVLLSPIARVPRPVAWNRHVVVMEFVEGTELAELRDTDLTREEAERILDRVLEEYLKIVRFGIVHSDMSEFNIVLTKDGDILIIDWAQYISTAHPESYELLKRDITVLLNAFRRRWGVKKEFEKVWPEFESAWKESRGEEGGN

SEQ ID NO: 1848 - protein, 74 aa, Thermococcus kodakaraensis KOD1
  misc_feature (321437)..(321437): n is a or c or g or t.
  misc_feature (52783)..(527833): n is a or c or g or t.
  misc_feature (527901)..(527901): n is a or c or g or t.
  misc_feature (527978)..(527978): n is a or c or g or t.
  misc_feature (960838)..(960839): n is a or c or g or t.
  misc_feature (960860)..(960861): n is a or c or g or t.
  misc_feature (960872)..(960873): n is a or c or g or t.
  misc_feature (960879)..(960879): n is a or c or g or t.
  misc_feature (960890)..(960890): n is a or c or g or t.
  misc_feature (1250239)..(1250239): n is a or c or g or t.
  misc_feature (1302432)..(1302434): n is a or c or g or t.
  misc_feature (1302471)..(1302471): n is a or c or g or t.
  misc_feature (1302488)..(1302488): n is a or c or g or t.
  misc_feature (1674836)..(1674836): n is a or c or g or t.
MGITKVTRNYQITIPSDIRKKLGIKVGDVLVIEIEDGKAVIKKSDLELPLLPGGKGLKIEDIEEAIRKGQGEDE

SEQ ID NO: 1849 - protein, 595 aa, Thermococcus kodakaraensis KOD1
  misc_feature (321437)..(321437): n is a or c or g or t.
  misc_feature (52783)..(527833): n is a or c or g or t.
  misc_feature (527901)..(527901): n is a or c or g or t.
  misc_feature (527978)..(527978): n is a or c or g or t.
  misc_feature (960838)..(960839): n is a or c or g or t.
  misc_feature (960860)..(960861): n is a or c or g or t.
  misc_feature (960872)..(960873): n is a or c or g or t.
  misc_feature (960879)..(960879): n is a or c or g or t.
  misc_feature (960890)..(960890): n is a or c or g or t.
  misc_feature (1250239)..(1250239): n is a or c or g or t.
  misc_feature (1302432)..(1302434): n is a or c or g or t.
  misc_feature (1302471)..(1302471): n is a or c or g or t.
  misc_feature (1302488)..(1302488): n is a or c or g or t.
  misc_feature (1674836)..(1674836): n is a or c or g or t.
VGVMRIAEDINKPVGIVTGEATVSSFQFYAHPDTDLKFGDFVVARLCKEAKDQNCRWGENEEGVEWVIGTIRGLKNINWLLSEGKSTYTSLELDIREYGESIGENEALIVTVHVLGKVQLNGEKAEVVPTRVPVPNGNRVYLASSDLLRAIYYGGNGYIELGRLIIREDVPVYLNVNELVSRHFAILAVTGAGKSNTVSVMLWKLVEELGGTVIVLDPHGDYTKLSLPGTGREYVNLIEAKIRPEAMDGEELADLMEIQSNASIQRSYLLRAWDTVLHENQGIGGREAVKLVHDLLQRWASEGGGTYWDPHAGQYRDLGEIKSAEKETIMRLTMKVSRFLRNYGHLLSSEDIVALIEPGKVNVIDLGPLDEGQMKLVVAKFLEKVFETRMDYEKARKRLDYLRTAYSSNISAVSDEINELEEFLRGVEKNYPALAEPVMVIVEEAHIFAPHGEKGGAVRILGRIAREGRKFGVGLGLVSQRPSRLSEDVLSQTNTKIIMRIVNPNDQQYVVRASEQVSGELMSDIAGLGKGEAVIVGQAISLPALVKIYNFKALGGNYGGEDIGAVERWLERKRRELEEKEKEEMYEEEGIEVDF

SEQ ID NO: 1850 - protein, 443 aa, Thermococcus kodakaraensis KOD1
  misc_feature (321437)..(321437): n is a or c or g or t.
  misc_feature (52783)..(527833): n is a or c or g or t.
  misc_feature (527901)..(527901): n is a or c or g or t.
  misc_feature (527978)..(527978): n is a or c or g or t.
  misc_feature (960838)..(960839): n is a or c or g or t.
  misc_feature (960860)..(960861): n is a or c or g or t.
  misc_feature (960872)..(960873): n is a or c or g or t.
  misc_feature (960879)..(960879): n is a or c or g or t.
  misc_feature (960890)..(960890): n is a or c or g or t.
  misc_feature (1250239)..(1250239): n is a or c or g or t.
  misc_feature (1302432)..(1302434): n is a or c or g or t.
  misc_feature (1302471)..(1302471): n is a or c or g or t.
  misc_feature (1302488)..(1302488): n is a or c or g or t.
  misc_feature (1674836)..(1674836): n is a or c or g or t.
MYRLIDRRSVDRIKALLERGYREAESKLAEIEWKPLPKERKQTRVYAVDGSQGKQRLSGTIFYAVSSYAFGNGPAYRLVYTNAMLYNQGISDQIIRLQMETLENKLGYLSAKLGDVDYVMMDGTLTGSLTRPPVYPESVKGLTTIENALGKGKLKELVKKFVSLLDEHYKELEDGLREKGKINGNVILADEKLEEFEEFYKAMKGYKVRDFAGTTPRGIKISRATIDEYLKGRKSAEEIFQELLNEYGEERELSLDDARNAVHVVLGYLEYLYSLEKLLRLNLVYVAKSFYNRKLTQKLGIDIVDVPYLDAYLRKRFGEEIPGYFIITQGGKAISHKMPKVLRETFPLVEHYIEHGVPMAYVRTMKGGVIYLLQSNREVDDDLLSEILWHESNGYFRPLQRAHEGVKIEKKAFEAELKALLNIIKAESPELRVFLKYGRSPLE

SEQ ID NO: 1851 - protein, 337 aa, Thermococcus kodakaraensis KOD1
  misc_feature (321437)..(321437): n is a or c or g or t.
  misc_feature (52783)..(527833): n is a or c or g or t.
  misc_feature (527901)..(527901): n is a or c or g or t.
  misc_feature (527978)..(527978): n is a or c or g or t.
  misc_feature (960838)..(960839): n is a or c or g or t.
  misc_feature (960860)..(960861): n is a or c or g or t.
  misc_feature (960872)..(960873): n is a or c or g or t.
  misc_feature (960879)..(960879): n is a or c or g or t.
  misc_feature (960890)..(960890): n is a or c or g or t.
  misc_feature (1250239)..(1250239): n is a or c or g or t.
  misc_feature (1302432)..(1302434): n is a or c or g or t.
  misc_feature (1302471)..(1302471): n is a or c or g or t.
  misc_feature (1302488)..(1302488): n is a or c or g or t.
  misc_feature (1674836)..(1674836): n is a or c or g or t.
MRKIIPALIVLSLLSIFLGVYIGPVGLSPSDVTSGIAYGVKVTLSRFFPFNLGEPPKYFSIIWKIRLPEVLLAYLVGLSLASAGVASQALFRNPLADPYIIGISSGAAFGAALSLLVGITYMPYLSLAFSFLSVFIVYSLARTNGKVPVDTLLLAGIAYGFLANAATWYIYVTHPHNAYITWTWLLGSFNGAEWKEVLIMLVVSSLGTGFLIWKWRELNLILLGEESIALGLDLHLYRKVFLGVIATLTAFAVYTSGVIGFVGLVSPHIMRIILGPNHRELTPSTALFGGILLVVADLLARTVAKPQVIPVGIITAFMGAPFFLYLLMKHKRGELMR

SEQ ID NO: 1852 - protein, 437 aa, Thermococcus kodakaraensis KOD1
  misc_feature (321437)..(321437): n is a or c or g or t.
  misc_feature (52783)..(527833): n is a or c or g or t.
  misc_feature (527901)..(527901): n is a or c or g or t.
  misc_feature (527978)..(527978): n is a or c or g or t.
  misc_feature (960838)..(960839): n is a or c or g or t.
  misc_feature (960860)..(960861): n is a or c or g or t.
  misc_feature (960872)..(960873): n is a or c or g or t.
  misc_feature (960879)..(960879): n is a or c or g or t.
  misc_feature (960890)..(960890): n is a or c or g or t.
  misc_feature (1250239)..(1250239): n is a or c or g or t.
  misc_feature (1302432)..(1302434): n is a or c or g or t.
  misc_feature (1302471)..(1302471): n is a or c or g or t.
  misc_feature (1302488)..(1302488): n is a or c or g or t.
  misc_feature (1674836)..(1674836): n is a or c or g or t.
VYFQYTSFKYYRALFLHMVGLKEITLEYIGALDYVEEIVREVEMPHGSDIKAIIGPRRVGKTFLMLKKAKNMLENGENVLYLPLDEPELARMEARELAEEVRKEYPSGKVTLFLDEVQEWGDWDRKLRWLHDVKDFDVYVSGSSSALLSSEIPTRLRGRHLSRFVLPLSFREITGTTKADTFRERGRLKALLQDYLKWGGFPEVWKTRSREKVISILETVLYRDIIERFSFRDVGEFKEVFYHALSLYGSYFTYRSLQRSLKALGLELNVKTLINYLSAMESAFLIFQLPLFSPSHRKTLVNPRKLYLVDTSFTNLFFKGEDAGRKIENMVFLELLREKSYFNPMIDLSYYSDGESEVDFVVREGNVVKKLIQVTYELNASNYEREVLSLVKAGKKLKCDDLILVTMDTEDRIEERGKEVKVVPLYKFLLEKRQKKA

SEQ ID NO: 1853 - protein, 198 aa, Thermococcus kodakaraensis KOD1
  misc_feature (321437)..(321437): n is a or c or g or t.
  misc_feature (52783)..(527833): n is a or c or g or t.
  misc_feature (527901)..(527901): n is a or c or g or t.
  misc_feature (527978)..(527978): n is a or c or g or t.
  misc_feature (960838)..(960839): n is a or c or g or t.
  misc_feature (960860)..(960861): n is a or c or g or t.
  misc_feature (960872)..(960873): n is a or c or g or t.
  misc_feature (960879)..(960879): n is a or c or g or t.
  misc_feature (960890)..(960890): n is a or c or g or t.
  misc_feature (1250239)..(1250239): n is a or c or g or t.
  misc_feature (1302432)..(1302434): n is a or c or g or t.
  misc_feature (1302471)..(1302471): n is a or c or g or t.
  misc_feature (1302488)..(1302488): n is a or c or g or t.
  misc_feature (1674836)..(1674836): n is a or c or g or t.
MARMEAGKMIIGVVGKIAAGKTTVAKFFEEKGFCRVSCSDPLIDLLTHNVSDYSWIPELPKKAEPTRDRLIEFGKYLKDKYGGDILIRLAVDKKRHCKNIVIDGVRSREEVETIKRLGGKVIYVEARPEIRYERLRKRRAEKDRVIQSFEDFLKMDEEEEKLYHTTKLKDIADYVIVNEGTLEELREKVEEIISEVMG

SEQ ID NO: 1854 - protein, 352 aa, Thermococcus kodakaraensis KOD1
  misc_feature (321437)..(321437): n is a or c or g or t.
  misc_feature (52783)..(527833): n is a or c or g or t.
  misc_feature (527901)..(527901): n is a or c or g or t.
  misc_feature (527978)..(527978): n is a or c or g or t.
  misc_feature (960838)..(960839): n is a or c or g or t.
  misc_feature (960860)..(960861): n is a or c or g or t.
  misc_feature (960872)..(960873): n is a or c or g or t.
  misc_feature (960879)..(960879): n is a or c or g or t.
  misc_feature (960890)..(960890): n is a or c or g or t.
  misc_feature (1250239)..(1250239): n is a or c or g or t.
  misc_feature (1302432)..(1302434): n is a or c or g or t.
  misc_feature (1302471)..(1302471): n is a or c or g or t.
  misc_feature (1302488)..(1302488): n is a or c or g or t.
  misc_feature (1674836)..(1674836): n is a or c or g or t.
MNPTLLIAGQTLSLGAKLFTVIYLWYSYQKSLRKSALIFALAFLAASLQVLGDLIGIELLAITMEALFASLLFYGSLRLLDEEGLSFTVSRGYYVSITPIILTLYMLAAERSSDPNWLATVGVAYAVSGLFVLLSGFLLVGLRNIYGNSMKYLGVLLIVYGAHEMDYPLLRPVEWFAPIGFSLSALLTVLIAYFFVKFAGHEEFLKTPSETQKPLKEVKPGLTILSPEEYRKILPVLQDRPLLAFVRNSRDPPEKWTVYTISQVERERTVPPTNLPKITEIINRYLRAAGSGGIVLIDGIEYIHMYNGFDAMAKWLSTIRDIAYLNNGSVIVVTDSRAWNEREWNLLIRLLS

SEQ ID NO: 1855 - protein, 269 aa, Thermococcus kodakaraensis KOD1
  misc_feature (321437)..(321437): n is a or c or g or t.
  misc_feature (52783)..(527833): n is a or c or g or t.
  misc_feature (527901)..(527901): n is a or c or g or t.
  misc_feature (527978)..(527978): n is a or c or g or t.
  misc_feature (960838)..(960839): n is a or c or g or t.
  misc_feature (960860)..(960861): n is a or c or g or t.
  misc_feature (960872)..(960873): n is a or c or g or t.
  misc_feature (960879)..(960879): n is a or c or g or t.
  misc_feature (960890)..(960890): n is a or c or g or t.
  misc_feature (1250239)..(1250239): n is a or c or g or t.
  misc_feature (1302432)..(1302434): n is a or c or g or t.
  misc_feature (1302471)..(1302471): n is a or c or g or t.
  misc_feature (1302488)..(1302488): n is a or c or g or t.
  misc_feature (1674836)..(1674836): n is a or c or g or t.
VDSPGESQERRRGSLEDIPPGKDQARKVQEIRRVSVHLVWELPNWRNPQIETKMHCKRGWKQSTYTITAETSWVIRMGVEENPKLPKSVQRHLEPDERVLFAIKKKISIEKPKWLLVTDRRIIYLDEKVLGRYDFKAIPYQKLEQVVVKLGIMSSEFIIEGEENITLKLGWMDKEEARKAINAIKDALNAIAVEPVSIDVNKGLTSETWVLKKPREFVTRTMPAYQPAQVREEKEDPLEKLKKLKELYDMGVISQEEYEEKRKKLLEEI

SEQ ID NO: 1856 - protein, 197 aa, Thermococcus kodakaraensis KOD1
  misc_feature (321437)..(321437): n is a or c or g or t.
  misc_feature (52783)..(527833): n is a or c or g or t.
  misc_feature (527901)..(527901): n is a or c or g or t.
  misc_feature (527978)..(527978): n is a or c or g or t.
  misc_feature (960838)..(960839): n is a or c or g or t.
  misc_feature (960860)..(960861): n is a or c or g or t.
  misc_feature (960872)..(960873): n is a or c or g or t.
  misc_feature (960879)..(960879): n is a or c or g or t.
  misc_feature (960890)..(960890): n is a or c or g or t.
  misc_feature (1250239)..(1250239): n is a or c or g or t.
  misc_feature (1302432)..(1302434): n is a or c or g or t.
  misc_feature (1302471)..(1302471): n is a or c or g or t.
  misc_feature (1302488)..(1302488): n is a or c or g or t.
  misc_feature (1674836)..(1674836): n is a or c or g or t.
VMKMGKEELMKKLEEKIRNCQKCPLGTLRTNAVPGAGSYDAKVMFVGEAPGYWEDQKGLPFVGRAGKLLDELLAEIGLSRDEVYITNIVKCRPPENRDPTEEEIKACSPYLDRQIDIIRPKVIIPLGRYSMNYLLRKFGFEPEPISRIHGKTFEAHTLFGKIIIMPMYHPAAALYKPPLREELRKDFQKLKSLLENI

SEQ ID NO: 1857 - protein, 254 aa, Thermococcus kodakaraensis KOD1
  misc_feature (321437)..(321437): n is a or c or g or t.
  misc_feature (52783)..(527833): n is a or c or g or t.
  misc_feature (527901)..(527901): n is a or c or g or t.
  misc_feature (527978)..(527978): n is a or c or g or t.
  misc_feature (960838)..(960839): n is a or c or g or t.
  misc_feature (960860)..(960861): n is a or c or g or t.
  misc_feature (960872)..(960873): n is a or c or g or t.
  misc_feature (960879)..(960879): n is a or c or g or t.
  misc_feature (960890)..(960890): n is a or c or g or t.
  misc_feature (1250239)..(1250239): n is a or c or g or t.
  misc_feature (1302432)..(1302434): n is a or c or g or t.
  misc_feature (1302471)..(1302471): n is a or c or g or t.
  misc_feature (1302488)..(1302488): n is a or c or g or t.
  misc_feature (1674836)..(1674836): n is a or c or g or t.
MGLIVPWLVFVADVILFLAIGYAIVFLIRRLNKYGDPQLNAFIKWSLVFLVIGEIGRITDLIDDFCCASSFDTLQYVTYFISIVGIIYSVIHYIKLVEMKYLPAVKKVPKLKSSFKAHIVFSKNRLLDVIDVLKEGDFPVLVITRSPDFYSGLNRENVSAIWVTQSGKGVAPTALHVLQGIILDFVQENPGSVVIIDCLEYLMLYNDFKSVFKFLSALKDYVVIQHGSGLIVFVDEEVLSNQERALLLKEFEPL

SEQ ID NO: 1858 - protein, 156 aa, Thermococcus kodakaraensis KOD1
  misc_feature (321437)..(321437): n is a or c or g or t.
  misc_feature (52783)..(527833): n is a or c or g or t.
  misc_feature (527901)..(527901): n is a or c or g or t.
  misc_feature (527978)..(527978): n is a or c or g or t.
  misc_feature (960838)..(960839): n is a or c or g or t.
  misc_feature (960860)..(960861): n is a or c or g or t.
  misc_feature (960872)..(960873): n is a or c or g or t.
  misc_feature (960879)..(960879): n is a or c or g or t.
  misc_feature (960890)..(960890): n is a or c or g or t.
  misc_feature (1250239)..(1250239): n is a or c or g or t.
  misc_feature (1302432)..(1302434): n is a or c or g or t.
  misc_feature (1302471)..(1302471): n is a or c or g or t.
  misc_feature (1302488)..(1302488): n is a or c or g or t.
  misc_feature (1674836)..(1674836): n is a or c or g or t.
MTTGIAMTGGLDAIDVKLLNELKENARENIASLSKKLGIPRTTVHYRIKRLVDEGIIEKFTVKPNYKKLDLGTTAFILARYDPDSGLTQREVAERIAALDGVYEVHIISGEWDMMIKVRAPSAEEVGKIVVDKLREIKGIGQTVTMVSFVTVKEEL

SEQ ID NO: 1859 - protein, 177 aa, Thermococcus kodakaraensis KOD1
  misc_feature (321437)..(321437): n is a or c or g or t.
  misc_feature (52783)..(527833): n is a or c or g or t.
  misc_feature (527901)..(527901): n is a or c or g or t.
  misc_feature (527978)..(527978): n is a or c or g or t.
  misc_feature (960838)..(960839): n is a or c or g or t.
  misc_feature (960860)..(960861): n is a or c or g or t.
  misc_feature (960872)..(960873): n is a or c or g or t.
  misc_feature (960879)..(960879): n is a or c or g or t.
  misc_feature (960890)..(960890): n is a or c or g or t.
  misc_feature (1250239)..(1250239): n is a or c or g or t.
  misc_feature (1302432)..(1302434): n is a or c or g or t.
  misc_feature (1302471)..(1302471): n is a or c or g or t.
  misc_feature (1302488)..(1302488): n is a or c or g or t.
  misc_feature (1674836)..(1674836): n is a or c or g or t.
MEDLEETLERFKDMLLGLSEREILSYWIWGEYEEARIYWGLAKKAEELRLPPGLLSAFRKLAKESEEHGDTLKRIYVKTYGEEPKKVDLPYIEAEVLSKAFEDPENIPKVLAIAMETELVAMELYRHLASITENEEARKVYQYLANVEWAHYQRLKGEAELMGFSVEQYGIKVKVTA

SEQ ID NO: 1860 - protein, 552 aa, Thermococcus kodakaraensis KOD1
  misc_feature (321437)..(321437): n is a or c or g or t.
  misc_feature (52783)..(527833): n is a or c or g or t.
  misc_feature (527901)..(527901): n is a or c or g or t.
  misc_feature (527978)..(527978): n is a or c or g or t.
  misc_feature (960838)..(960839): n is a or c or g or t.
  misc_feature (960860)..(960861): n is a or c or g or t.
  misc_feature (960872)..(960873): n is a or c or g or t.
  misc_feature (960879)..(960879): n is a or c or g or t.
  misc_feature (960890)..(960890): n is a or c or g or t.
  misc_feature (1250239)..(1250239): n is a or c or g or t.
  misc_feature (1302432)..(1302434): n is a or c or g or t.
  misc_feature (1302471)..(1302471): n is a or c or g or t.
  misc_feature (1302488)..(1302488): n is a or c or g or t.
  misc_feature (1674836)..(1674836): n is a or c or g or t.
VMGMKKAVALLILSVVFIAGCIGGTTNTNTKTASTSAGSSGINFKSYAPGKVLASWYELFNETFYVSNGYEDLVKHYFPNASVKPSSEYPGSGILVLSPQDVYSKKILFGKPVQVQKLDFFGYIAYRNGMHYIGPWHGVVAIFNSKEGNPVMVVSGTSRAGVGAALNFLAGVKSGKVQLDRTAVVRSGNFEGMLVKEIGDTNLDGIAGEDEFVTLHQIIFDEPFQYYWRVVKGENITVSGGFIRMVNDTKVYIRALGFNVSVRVKNNKGITLTYVIDNINPNYVMAVSDQEDAMKEAIFGGTKVVVVSSGDFSIIPANVSNYTVLAFGDHRPGSGEKQPEVFFKIRDAINKENGAFVIDSGDLVYSGTIYQWEELMKAWKWNKPVFVAVGNHEYNGESVNIYHYYFGPTDYAFSLGGYRYIFANNVMNGYRLTDEQWAWLEKELERAKERGERPVIVMHAPPYDPRPSDEHTLDPSDAKKLLELMREYNAFGIFGHIHVYWYGTYEGVPFVITGGGGAPLYAKPEEGGFYHYVRLFMRDDGSIEVEPVEVSP

SEQ ID NO: 1861 - protein, 224 aa, Thermococcus kodakaraensis KOD1
  misc_feature (321437)..(321437): n is a or c or g or t.
  misc_feature (52783)..(527833): n is a or c or g or t.
  misc_feature (527901)..(527901): n is a or c or g or t.
  misc_feature (527978)..(527978): n is a or c or g or t.
  misc_feature (960838)..(960839): n is a or c or g or t.
  misc_feature (960860)..(960861): n is a or c or g or t.
  misc_feature (960872)..(960873): n is a or c or g or t.
  misc_feature (960879)..(960879): n is a or c or g or t.
  misc_feature (960890)..(960890): n is a or c or g or t.
  misc_feature (1250239)..(1250239): n is a or c or g or t.
  misc_feature (1302432)..(1302434): n is a or c or g or t.
  misc_feature (1302471)..(1302471): n is a or c or g or t.
  misc_feature (1302488)..(1302488): n is a or c or g or t.
  misc_feature (1674836)..(1674836): n is a or c or g or t.
MQVWTKLFAKSPFKPLIKHAEVALQTVETLEKALQAWREGNYEEMKKLALEVDRLEDVADRIKEEIRDSLSSKLMMAVAREDVLIYLHMQDKVADAAEDTAKWLLVKEPGNIPEEIKEVILQMGTESIKAAKLVYEAIVQMDRVIESGFAEKEIEREYEIIHEIEGVESKIDGLDTELMRLVFQNAGRMDWSEGFYILNIARTLSNISDKAKDAAERIRLMMNK

SEQ ID NO: 1862 - protein, 189 aa, Thermococcus kodakaraensis KOD1
  misc_feature (321437)..(321437): n is a or c or g or t.
  misc_feature (52783)..(527833): n is a or c or g or t.
  misc_feature (527901)..(527901): n is a or c or g or t.
  misc_feature (527978)..(527978): n is a or c or g or t.
  misc_feature (960838)..(960839): n is a or c or g or t.
  misc_feature (960860)..(960861): n is a or c or g or t.
  misc_feature (960872)..(960873): n is a or c or g or t.
  misc_feature (960879)..(960879): n is a or c or g or t.
  misc_feature (960890)..(960890): n is a or c or g or t.
  misc_feature (1250239)..(1250239): n is a or c or g or t.
  misc_feature (1302432)..(1302434): n is a or c or g or t.
  misc_feature (1302471)..(1302471): n is a or c or g or t.
  misc_feature (1302488)..(1302488): n is a or c or g or t.
  misc_feature (1674836)..(1674836): n is a or c or g or t.
MATLTLALYNTYDTKRLHEAHLRAIARAAPIAYAYGFHLALVGFPLDGKPMEIAEEVSRHTTIGDGGKYLQELAKANKFHLLEFPKKGFPPQFGTPVATTRKPWPEKEITPLDLTREALSGRSFLLLIGLGRHGLPEEIFKIARYHMDVTGKRTSLETCTAMGAIGARIATYMEALKWKSGKKTSHGSF

SEQ ID NO: 1863 - protein, 281 aa, Thermococcus kodakaraensis KOD1
  misc_feature (321437)..(321437): n is a or c or g or t.
  misc_feature (52783)..(527833): n is a or c or g or t.
  misc_feature (527901)..(527901): n is a or c or g or t.
  misc_feature (527978)..(527978): n is a or c or g or t.
  misc_feature (960838)..(960839): n is a or c or g or t.
  misc_feature (960860)..(960861): n is a or c or g or t.
  misc_feature (960872)..(960873): n is a or c or g or t.
  misc_feature (960879)..(960879): n is a or c or g or t.
  misc_feature (960890)..(960890): n is a or c or g or t.
  misc_feature (1250239)..(1250239): n is a or c or g or t.
  misc_feature (1302432)..(1302434): n is a or c or g or t.
  misc_feature (1302471)..(1302471): n is a or c or g or t.
  misc_feature (1302488)..(1302488): n is a or c or g or t.
  misc_feature (1674836)..(1674836): n is a or c or g or t.
VTRMFEKILYPTDFSDVSLHALHNCLPDLFELGAKELHLLHVIDITVAELQAFELEEIYKNKLEELAKTLREKGIDVKTSVRIGIPSLEIAEEAESIGADLIISPSVGENVWRQMFLGSTASNLVRATRRPVLLLKYSKKDDSFELPVKCSELFQRPLVALDFSECSEKITNAVAKFRELIEKGILLHSVDYGKIDELESNIEAAKKRLEEIAEKLGVEFEKEVMVGTASQAIIGTALAKKATLIVIGKKGRSIIKELILGSTAERVIRDSKLPVLLVPCE

SEQ ID NO: 1864 - protein, 320 aa, Thermococcus kodakaraensis KOD1
  misc_feature (321437)..(321437): n is a or c or g or t.
  misc_feature (52783)..(527833): n is a or c or g or t.
  misc_feature (527901)..(527901): n is a or c or g or t.
  misc_feature (527978)..(527978): n is a or c or g or t.
  misc_feature (960838)..(960839): n is a or c or g or t.
  misc_feature (960860)..(960861): n is a or c or g or t.
  misc_feature (960872)..(960873): n is a or c or g or t.
  misc_feature (960879)..(960879): n is a or c or g or t.
  misc_feature (960890)..(960890): n is a or c or g or t.
  misc_feature (1250239)..(1250239): n is a or c or g or t.
  misc_feature (1302432)..(1302434): n is a or c or g or t.
  misc_feature (1302471)..(1302471): n is a or c or g or t.
  misc_feature (1302488)..(1302488): n is a or c or g or t.
  misc_feature (1674836)..(1674836): n is a or c or g or t.
VGRNGYLNLFPKCYNLPVQFPILVVKVKLDVIGIGNLNYDIIFTLERFPEFHEKINARGAHFGLGGAAANTISWLAHFGLKTGYIGAVGNDDVGEMHIKYFQGIGVDTGGIDVVEEPSGVAVAMVAGDDKRIVKYPGANLRRRFKPEYASRAKFLHLSSNPPELIEEAVNFASQRGIKVSLDIGEAPLPRELESKVDYLMMNEDEYRRKYGSLDPSLCRAKNLVVTLNGGGALVREGDNVFEVRGLSAKVVDSTGAGDSFDAGVIYGVLNGWSLLDSAKLGMLLAYLTVQKVGARSAIVPLEEVKRIAREVGLDLPFNRT

SEQ ID NO: 1865 - protein, 26 aa, Thermococcus kodakaraensis KOD1
  misc_feature (321437)..(321437): n is a or c or g or t.
  misc_feature (52783)..(527833): n is a or c or g or t.
  misc_feature (527901)..(527901): n is a or c or g or t.
  misc_feature (527978)..(527978): n is a or c or g or t.
  misc_feature (960838)..(960839): n is a or c or g or t.
  misc_feature (960860)..(960861): n is a or c or g or t.
  misc_feature (960872)..(960873): n is a or c or g or t.
  misc_feature (960879)..(960879): n is a or c or g or t.
  misc_feature (960890)..(960890): n is a or c or g or t.
  misc_feature (1250239)..(1250239): n is a or c or g or t.
  misc_feature (1302432)..(1302434): n is a or c or g or t.
  misc_feature (1302471)..(1302471): n is a or c or g or t.
  misc_feature (1302488)..(1302488): n is a or c or g or t.
  misc_feature (1674836)..(1674836): n is a or c or g or t.
MTSHPIELEACEYPPPENMVLTVEIA

SEQ ID NO: 1866 - protein, 60 aa, Thermococcus kodakaraensis KOD1
  misc_feature (321437)..(321437): n is a or c or g or t.
  misc_feature (52783)..(527833): n is a or c or g or t.
  misc_feature (527901)..(527901): n is a or c or g or t.
  misc_feature (527978)..(527978): n is a or c or g or t.
  misc_feature (960838)..(960839): n is a or c or g or t.
  misc_feature (960860)..(960861): n is a or c or g or t.
  misc_feature (960872)..(960873): n is a or c or g or t.
  misc_feature (960879)..(960879): n is a or c or g or t.
  misc_feature (960890)..(960890): n is a or c or g or t.
  misc_feature (1250239)..(1250239): n is a or c or g or t.
  misc_feature (1302432)..(1302434): n is a or c or g or t.
  misc_feature (1302471)..(1302471): n is a or c or g or t.
  misc_feature (1302488)..(1302488): n is a or c or g or t.
  misc_feature (1674836)..(1674836): n is a or c or g or t.
MKFKSPLEAEDAIYGMLDDLQVYGGKVKLKLREGNVIEKIEVLELYKPSAKELLDEYFND

SEQ ID NO: 1867 - protein, 167 aa, Thermococcus kodakaraensis KOD1
  misc_feature (321437)..(321437): n is a or c or g or t.
  misc_feature (52783)..(527833): n is a or c or g or t.
  misc_feature (527901)..(527901): n is a or c or g or t.
  misc_feature (527978)..(527978): n is a or c or g or t.
  misc_feature (960838)..(960839): n is a or c or g or t.
  misc_feature (960860)..(960861): n is a or c or g or t.
  misc_feature (960872)..(960873): n is a or c or g or t.
  misc_feature (960879)..(960879): n is a or c or g or t.
  misc_feature (960890)..(960890): n is a or c or g or t.
  misc_feature (1250239)..(1250239): n is a or c or g or t.
  misc_feature (1302432)..(1302434): n is a or c or g or t.
  misc_feature (1302471)..(1302471): n is a or c or g or t.
  misc_feature (1302488)..(1302488): n is a or c or g or t.
  misc_feature (1674836)..(1674836): n is a or c or g or t.
MLFGKLVFLTFGLYWVLKMAGITFNGDFMKRLEYSAHLKWDGNVGSEAKVREFTFHIDTNTDGHNKGPNPTEYLLAAIGGCLTVNWGRLIKKMRLDVKGFEVEVRGWRGLDEPQLKEITYKITVFTNEDEKKIMRVKELAEKYGTVFNTVGAEKIKGEVEIIKPADP

SEQ ID NO: 1868 - protein, 330 aa, Thermococcus kodakaraensis KOD1
  misc_feature (321437)..(321437): n is a or c or g or t.
  misc_feature (52783)..(527833): n is a or c or g or t.
  misc_feature (527901)..(527901): n is a or c or g or t.
  misc_feature (527978)..(527978): n is a or c or g or t.
  misc_feature (960838)..(960839): n is a or c or g or t.
  misc_feature (960860)..(960861): n is a or c or g or t.
  misc_feature (960872)..(960873): n is a or c or g or t.
  misc_feature (960879)..(960879): n is a or c or g or t.
  misc_feature (960890)..(960890): n is a or c or g or t.
  misc_feature (1250239)..(1250239): n is a or c or g or t.
  misc_feature (1302432)..(1302434): n is a or c or g or t.
  misc_feature (1302471)..(1302471): n is a or c or g or t.
  misc_feature (1302488)..(1302488): n is a or c or g or t.
  misc_feature (1674836)..(1674836): n is a or c or g or t.
MRINVRDFAPSWFASVMGTGALALVSKAYSSKLPALGTFSKALVYLNAAVFFILLIPWLLRWIKYPSEAKRDLYHPVTSHFYGTMPIAMTIVAINLAMVGHREIALPLWILGSILVVVFALLIPYLFFVGEGVDVKTITPAWFIPPVGLIVIPLTALPFLPQSQTWREVFIAFNYFGFGAGFFLYLALFAIVMRRFITHELLPPMMAPAVWINLGPLGAGAVALLNLVKVLPVAGEAFKGFAFILWGFGLWWLIMAILMTLHYLRNLHLPYSLAWWGFIFPLGAYVSATYNVGTSLGIGAMVDFGFALYWFLLALWLVTGVKTLLHDFSS

SEQ ID NO: 1869 - protein, 158 aa, Thermococcus kodakaraensis KOD1
  misc_feature (321437)..(321437): n is a or c or g or t.
  misc_feature (52783)..(527833): n is a or c or g or t.
  misc_feature (527901)..(527901): n is a or c or g or t.
  misc_feature (527978)..(527978): n is a or c or g or t.
  misc_feature (960838)..(960839): n is a or c or g or t.
  misc_feature (960860)..(960861): n is a or c or g or t.
  misc_feature (960872)..(960873): n is a or c or g or t.
  misc_feature (960879)..(960879): n is a or c or g or t.
  misc_feature (960890)..(960890): n is a or c or g or t.
  misc_feature (1250239)..(1250239): n is a or c or g or t.
  misc_feature (1302432)..(1302434): n is a or c or g or t.
  misc_feature (1302471)..(1302471): n is a or c or g or t.
  misc_feature (1302488)..(1302488): n is a or c or g or t.
  misc_feature (1674836)..(1674836): n is a or c or g or t.
MSVLEDVFSGKTRIVICGIGNDVRGDDAFGVLVAERLKELVKTPDVLILNCGEMPESYVGKIAAFKPDLVVFVDAIHFGGEIGEFIIADPLKTLGEAVSTHGLPLRIVASYIKEQTGSDIVLIGCQPGSTGLFEEPSELIKERAERLAELIAEILKNK

SEQ ID NO: 1870 - protein, 206 aa, Thermococcus kodakaraensis KOD1
  misc_feature (321437)..(321437): n is a or c or g or t.
  misc_feature (52783)..(527833): n is a or c or g or t.
  misc_feature (527901)..(527901): n is a or c or g or t.
  misc_feature (527978)..(527978): n is a or c or g or t.
  misc_feature (960838)..(960839): n is a or c or g or t.
  misc_feature (960860)..(960861): n is a or c or g or t.
  misc_feature (960872)..(960873): n is a or c or g or t.
  misc_feature (960879)..(960879): n is a or c or g or t.
  misc_feature (960890)..(960890): n is a or c or g or t.
  misc_feature (1250239)..(1250239): n is a or c or g or t.
  misc_feature (1302432)..(1302434): n is a or c or g or t.
  misc_feature (1302471)..(1302471): n is a or c or g or t.
  misc_feature (1302488)..(1302488): n is a or c or g or t.
  misc_feature (1674836)..(1674836): n is a or c or g or t.
VVPMAKTTFEEEIYLRALTGRLVGKALADLGLNKVAVVASRNIICSSIATATEATYITLSGGVTYHFLAEAGKEADIAKRVKEFAPQVTVLQFGGETPIEETKKIFVETLRQFAEQDVPGAFVVHVRIFAAGGLAEALKDEKIREYLGKKDLFVYTVGFDEGKVYVNKILLDGEEIKLEKIAEYQVTLEHADLLNRSLKDRSVTFA

SEQ ID NO: 1871 - protein, 341 aa, Thermococcus kodakaraensis KOD1
  misc_feature (321437)..(321437): n is a or c or g or t.
  misc_feature (52783)..(527833): n is a or c or g or t.
  misc_feature (527901)..(527901): n is a or c or g or t.
  misc_feature (527978)..(527978): n is a or c or g or t.
  misc_feature (960838)..(960839): n is a or c or g or t.
  misc_feature (960860)..(960861): n is a or c or g or t.
  misc_feature (960872)..(960873): n is a or c or g or t.
  misc_feature (960879)..(960879): n is a or c or g or t.
  misc_feature (960890)..(960890): n is a or c or g or t.
  misc_feature (1250239)..(1250239): n is a or c or g or t.
  misc_feature (1302432)..(1302434): n is a or c or g or t.
  misc_feature (1302471)..(1302471): n is a or c or g or t.
  misc_feature (1302488)..(1302488): n is a or c or g or t.
  misc_feature (1674836)..(1674836): n is a or c or g or t.
VIKMGEKIKLEHGAGGEIMEELLRDVILKTLTLKSAGGIGLDALDDGATIPFGDKHIVFTIDGHTVKPLFFPGGDIGRLAVSGTVNDLAVMGAEPIALANSMIIGEGLDMEVLKRVLKSMDETAREVPVPIVTGDTKVVEDKIEMFVITAGIGIAEHPVSDAGAKVGDAVLVSGTIGDHGIALMSHREGIAFETELKSDVAPIWDVVKAVAETIGWENIHAMKDPTRAGLSNALNEIARKSNVGILVREADIPIRPEVRAASEMLGISPYDVANEGKVVMVVAREYAEEALEAMRKTEKGRNAAIIGEVIADYRGKVLLETGIGGKRFMEPPEGDPVPRIC

SEQ ID NO: 1872 - protein, 100 aa, Thermococcus kodakaraensis KOD1
  misc_feature (321437)..(321437): n is a or c or g or t.
  misc_feature (52783)..(527833): n is a or c or g or t.
  misc_feature (527901)..(527901): n is a or c or g or t.
  misc_feature (527978)..(527978): n is a or c or g or t.
  misc_feature (960838)..(960839): n is a or c or g or t.
  misc_feature (960860)..(960861): n is a or c or g or t.
  misc_feature (960872)..(960873): n is a or c or g or t.
  misc_feature (960879)..(960879): n is a or c or g or t.
  misc_feature (960890)..(960890): n is a or c or g or t.
  misc_feature (1250239)..(1250239): n is a or c or g or t.
  misc_feature (1302432)..(1302434): n is a or c or g or t.
  misc_feature (1302471)..(1302471): n is a or c or g or t.
  misc_feature (1302488)..(1302488): n is a or c or g or t.
  misc_feature (1674836)..(1674836): n is a or c or g or t.
VVGVIIAKPCTTMKGIVISGYSWEKPIKIDLTKTAQCLRERGHSVKKLLPGMMLILEMEGYEVSVYPSGKIIVKLLDDAELGRKIAETIYDCAGILEVVA

SEQ ID NO: 1873 - protein, 320 aa, Thermococcus kodakaraensis KOD1
  misc_feature (321437)..(321437): n is a or c or g or t.
  misc_feature (52783)..(527833): n is a or c or g or t.
  misc_feature (527901)..(527901): n is a or c or g or t.
  misc_feature (527978)..(527978): n is a or c or g or t.
  misc_feature (960838)..(960839): n is a or c or g or t.
  misc_feature (960860)..(960861): n is a or c or g or t.
  misc_feature (960872)..(960873): n is a or c or g or t.
  misc_feature (960879)..(960879): n is a or c or g or t.
  misc_feature (960890)..(960890): n is a or c or g or t.
  misc_feature (1250239)..(1250239): n is a or c or g or t.
  misc_feature (1302432)..(1302434): n is a or c or g or t.
  misc_feature (1302471)..(1302471): n is a or c or g or t.
  misc_feature (1302488)..(1302488): n is a or c or g or t.
  misc_feature (1674836)..(1674836): n is a or c or g or t.
MDALAIAIVAVAFYIAWNIGSNDSANAMGTAVGAGILSFRQATLTIAIFTLLGAYLKGYKVMKTVGKGIVPEGYLTMEMALIALLSAGVWVTIATIKGLPVSTTQAIVGGVIGVGLATSAPVNWWTLTKIAAAWVASPVLSGILAIILYKFYSYVISKIKSVSTIEALYKALAILGGSYMAFNFGTNEVANASGPIVGAGFMAPKTAGVLVALSLAVGALTFSYAVMHTVGKKITALGPVSAFAAQFGSAMAVSIANVFGLPVSSSQSIVGGVVGVGLLAGRGVDRKVIVDIVFGWVATPLTAIGISFVLLKLFALAGMV

SEQ ID NO: 1874 - protein, 191 aa, Thermococcus kodakaraensis KOD1
  misc_feature (321437)..(321437): n is a or c or g or t.
  misc_feature (52783)..(527833): n is a or c or g or t.
  misc_feature (527901)..(527901): n is a or c or g or t.
  misc_feature (527978)..(527978): n is a or c or g or t.
  misc_feature (960838)..(960839): n is a or c or g or t.
  misc_feature (960860)..(960861): n is a or c or g or t.
  misc_feature (960872)..(960873): n is a or c or g or t.
  misc_feature (960879)..(960879): n is a or c or g or t.
  misc_feature (960890)..(960890): n is a or c or g or t.
  misc_feature (1250239)..(1250239): n is a or c or g or t.
  misc_feature (1302432)..(1302434): n is a or c or g or t.
  misc_feature (1302471)..(1302471): n is a or c or g or t.
  misc_feature (1302488)..(1302488): n is a or c or g or t.
  misc_feature (1674836)..(1674836): n is a or c or g or t.
VLGEQEGLPQDKGRREGRGLAVKLKTPLGEEVLELRAGDVVYLSGRIYTARDAAHRKILELSKKGKLPFELEGAVIYHCGPVVRRKEDGWKVVSAGPTTSARMNRYLDEILSLGVRGIIGKGGMEVGPFVGRAVYFAFTGGAGSLAAESVKRVVDVYWLDELGIPEAVWVLEVEDFPLLVAIDSRGNSLYR

SEQ ID NO: 1875 - protein, 359 aa, Thermococcus kodakaraensis KOD1
  misc_feature (321437)..(321437): n is a or c or g or t.
  misc_feature (52783)..(527833): n is a or c or g or t.
  misc_feature (527901)..(527901): n is a or c or g or t.
  misc_feature (527978)..(527978): n is a or c or g or t.
  misc_feature (960838)..(960839): n is a or c or g or t.
  misc_feature (960860)..(960861): n is a or c or g or t.
  misc_feature (960872)..(960873): n is a or c or g or t.
  misc_feature (960879)..(960879): n is a or c or g or t.
  misc_feature (960890)..(960890): n is a or c or g or t.
  misc_feature (1250239)..(1250239): n is a or c or g or t.
  misc_feature (1302432)..(1302434): n is a or c or g or t.
  misc_feature (1302471)..(1302471): n is a or c or g or t.
  misc_feature (1302488)..(1302488): n is a or c or g or t.
  misc_feature (1674836)..(1674836): n is a or c or g or t.
VSAMEVLTKDEIINRIIRERGLSRSEIEEKIRELAKMHGVSENAAAVMLAEELGVSLGKEEEMLYIKDLVPGMTGVNIVARIKRKFPPREYTRRDGSTGRVADLIIYDSTGQARLVLWDAMVAKYYDDLNVGDVIKVIDPTVKEGMRGVELHANFRTRIIKNPEDPRVEEIPPLEEVRSYNYRRVQIKELQGGERFVEVRGTIAKLYRVLVYDACPECRRRVDYDPSTDTWICPEHGPVNPVKITVLDFGLDDSTGYIRTTLFGDSAAELIGEEPEVIDEKLKKLIDEGLTPKEAGKRLAEDEYYPLIGKEIVVRGSVVEDKFLGTLFKARSWDEVNEKAEIERVRRELYRELKEYGLE

SEQ ID NO: 1876 - protein, 130 aa, Thermococcus kodakaraensis KOD1
  misc_feature (321437)..(321437): n is a or c or g or t.
  misc_feature (52783)..(527833): n is a or c or g or t.
  misc_feature (527901)..(527901): n is a or c or g or t.
  misc_feature (527978)..(527978): n is a or c or g or t.
  misc_feature (960838)..(960839): n is a or c or g or t.
  misc_feature (960860)..(960861): n is a or c or g or t.
  misc_feature (960872)..(960873): n is a or c or g or t.
  misc_feature (960879)..(960879): n is a or c or g or t.
  misc_feature (960890)..(960890): n is a or c or g or t.
  misc_feature (1250239)..(1250239): n is a or c or g or t.
  misc_feature (1302432)..(1302434): n is a or c or g or t.
  misc_feature (1302471)..(1302471): n is a or c or g or t.
  misc_feature (1302488)..(1302488): n is a or c or g or t.
  misc_feature (1674836)..(1674836): n is a or c or g or t.
MEVGGMATFKLVISNPKNGVAKQVEISGPEADKLIGRRIGEEIPASELGLNLSEIFGEEIPADAKLKITGGTDKDGFPMRPDVHGPRRVKILLSRGPGFRPRERGERRKKTVHGNTISPNIVQVNMKIVF

SEQ ID NO: 1877 - protein, 263 aa, Thermococcus kodakaraensis KOD1
  misc_feature (321437)..(321437): n is a or c or g or t.
  misc_feature (52783)..(527833): n is a or c or g or t.
  misc_feature (527901)..(527901): n is a or c or g or t.
  misc_feature (527978)..(527978): n is a or c or g or t.
  misc_feature (960838)..(960839): n is a or c or g or t.
  misc_feature (960860)..(960861): n is a or c or g or t.
  misc_feature (960872)..(960873): n is a or c or g or t.
  misc_feature (960879)..(960879): n is a or c or g or t.
  misc_feature (960890)..(960890): n is a or c or g or t.
  misc_feature (1250239)..(1250239): n is a or c or g or t.
  misc_feature (1302432)..(1302434): n is a or c or g or t.
  misc_feature (1302471)..(1302471): n is a or c or g or t.
  misc_feature (1302488)..(1302488): n is a or c or g or t.
  misc_feature (1674836)..(1674836): n is a or c or g or t.
MGGEKMYTEEGLLNEIRELMDDDELFEMYERAFREYHYYFDTTNYIVLNVYNFNDHGPIHVLLTTRRALELLRIIRKFSIQTTAEKLGKPFRWSKFIVAFGALFHDIGNMIHRTPHYQFSVFLAEPIIDKLVREFEERDPLLLKALTLNAIYTHDEHVPCTTIEGSLVTIADGCDMEEGRSRLVHKKDKVDIHAVSALAIKRVEIKEGNEEEPILIEIWMKHPAGIFQVDEILTKKVKSSLLSGKVRLRIHTGADGEIFEKVV

SEQ ID NO: 1878 - protein, 358 aa, Thermococcus kodakaraensis KOD1
  misc_feature (321437)..(321437): n is a or c or g or t.
  misc_feature (52783)..(527833): n is a or c or g or t.
  misc_feature (527901)..(527901): n is a or c or g or t.
  misc_feature (527978)..(527978): n is a or c or g or t.
  misc_feature (960838)..(960839): n is a or c or g or t.
  misc_feature (960860)..(960861): n is a or c or g or t.
  misc_feature (960872)..(960873): n is a or c or g or t.
  misc_feature (960879)..(960879): n is a or c or g or t.
  misc_feature (960890)..(960890): n is a or c or g or t.
  misc_feature (1250239)..(1250239): n is a or c or g or t.
  misc_feature (1302432)..(1302434): n is a or c or g or t.
  misc_feature (1302471)..(1302471): n is a or c or g or t.
  misc_feature (1302488)..(1302488): n is a or c or g or t.
  misc_feature (1674836)..(1674836): n is a or c or g or t.
MGAANTTSLWNQGVLGKKLLFTLTTGAVVKAVLILVVGLVIAKVLRKYLLSLARTTKYVWIINEDTASTLHNMVVVVALVYSLDALGVLSITVAGTSLSNILAAFLVFYFSYVLAKKSKDYIIMRSSKQKLPEVQLKAKLYYYTFVTLAFFIALNIAGLSGRLSTIVAAAGITGIVLGFASQTVVANFISGIFMYFDKPLKIGDPVEVAGYSGVVHDIRILSTRIRTWDGLLVRIPNEKLFNSDIKNLQKYPARRVDITVGIAYKEDAGRAIEVIKKTLDEMPYVLAEPEPMVFVDNLGDSSVNIAVKAWAPSEKWFDVRWQIVQKIKEALDREGIEIPFPQRVNWFAEELRVKVEKD

SEQ ID NO: 1879 - protein, 58 aa, Thermococcus kodakaraensis KOD1
  misc_feature (321437)..(321437): n is a or c or g or t.
  misc_feature (52783)..(527833): n is a or c or g or t.
  misc_feature (527901)..(527901): n is a or c or g or t.
  misc_feature (527978)..(527978): n is a or c or g or t.
  misc_feature (960838)..(960839): n is a or c or g or t.
  misc_feature (960860)..(960861): n is a or c or g or t.
  misc_feature (960872)..(960873): n is a or c or g or t.
  misc_feature (960879)..(960879): n is a or c or g or t.
  misc_feature (960890)..(960890): n is a or c or g or t.
  misc_feature (1250239)..(1250239): n is a or c or g or t.
  misc_feature (1302432)..(1302434): n is a or c or g or t.
  misc_feature (1302471)..(1302471): n is a or c or g or t.
  misc_feature (1302488)..(1302488): n is a or c or g or t.
  misc_feature (1674836)..(1674836): n is a or c or g or t.
MLSFFTVFVLTYVKIFNPVLTLQNIAIENELKTLLPYLVVSAALIPAAIEISARRDVR

SEQ ID NO: 1880 - protein, 101 aa, Thermococcus kodakaraensis KOD1
  misc_feature (321437)..(321437): n is a or c or g or t.
  misc_feature (52783)..(527833): n is a or c or g or t.
  misc_feature (527901)..(527901): n is a or c or g or t.
  misc_feature (527978)..(527978): n is a or c or g or t.
  misc_feature (960838)..(960839): n is a or c or g or t.
  misc_feature (960860)..(960861): n is a or c or g or t.
  misc_feature (960872)..(960873): n is a or c or g or t.
  misc_feature (960879)..(960879): n is a or c or g or t.
  misc_feature (960890)..(960890): n is a or c or g or t.
  misc_feature (1250239)..(1250239): n is a or c or g or t.
  misc_feature (1302432)..(1302434): n is a or c or g or t.
  misc_feature (1302471)..(1302471): n is a or c or g or t.
  misc_feature (1302488)..(1302488): n is a or c or g or t.
  misc_feature (1674836)..(1674836): n is a or c or g or t.
MKAELNRALIVATAKELLSQFGPHFLPTLEAYLRAKYNATLEIAGEDPAKFYRAVEELFGEFGASMFFYNLLMELHLKPDKRDKETVIALLKKFAGVEDGE

SEQ ID NO: 1881 - protein, 264 aa, Thermococcus kodakaraensis KOD1
  misc_feature (321437)..(321437): n is a or c or g or t.
  misc_feature (52783)..(527833): n is a or c or g or t.
  misc_feature (527901)..(527901): n is a or c or g or t.
  misc_feature (527978)..(527978): n is a or c or g or t.
  misc_feature (960838)..(960839): n is a or c or g or t.
  misc_feature (960860)..(960861): n is a or c or g or t.
  misc_feature (960872)..(960873): n is a or c or g or t.
  misc_feature (960879)..(960879): n is a or c or g or t.
  misc_feature (960890)..(960890): n is a or c or g or t.
  misc_feature (1250239)..(1250239): n is a or c or g or t.
  misc_feature (1302432)..(1302434): n is a or c or g or t.
  misc_feature (1302471)..(1302471): n is a or c or g or t.
  misc_feature (1302488)..(1302488): n is a or c or g or t.
  misc_feature (1674836)..(1674836): n is a or c or g or t.
MSELVFEVFISLTLLAAGLLTFAFRNRRNYFIGFRIGYTYMSDRAWRETNTFAGLFMMVFSVLLLGLALAGLGILTFILTMLAGVVFLTVAGFRVAKKAYEEEELSIEAPEKPSEKIEVNVRPYLVIQLLGLVAYIILAAILWDKLPERVAIHFNASGEPDNFASKTLGTLLFPLVVYPLFLVMTYFLREPAFAPLLRFSRRGWKAFAEFTTVMALGLVAIDSLVLLYNAGQVPSSWIGYSVWTFLIVTIGMIFRLFWARGEGT

SEQ ID NO: 1882 - protein, 282 aa, Thermococcus kodakaraensis KOD1
  misc_feature (321437)..(321437): n is a or c or g or t.
  misc_feature (52783)..(527833): n is a or c or g or t.
  misc_feature (527901)..(527901): n is a or c or g or t.
  misc_feature (527978)..(527978): n is a or c or g or t.
  misc_feature (960838)..(960839): n is a or c or g or t.
  misc_feature (960860)..(960861): n is a or c or g or t.
  misc_feature (960872)..(960873): n is a or c or g or t.
  misc_feature (960879)..(960879): n is a or c or g or t.
  misc_feature (960890)..(960890): n is a or c or g or t.
  misc_feature (1250239)..(1250239): n is a or c or g or t.
  misc_feature (1302432)..(1302434): n is a or c or g or t.
  misc_feature (1302471)..(1302471): n is a or c or g or t.
  misc_feature (1302488)..(1302488): n is a or c or g or t.
  misc_feature (1674836)..(1674836): n is a or c or g or t.
VVTALITRQEGLGVIIAGLKSPPEFLTVVVKMTMRFIPLIVARPEVQMAIDEAIMRARIEGKVPDTVRLYAFSPSSVTIGRFQSVVHDVNLDEAKKLRIPVVRRITGGGSVFHDEYGEITYSIVIGEDYHPALKNVEESYRYLAGPLVDALKDLGLKAGFSGLNDIVANGKKISGSAQTRRRGVILQHGTFMYATRVEILGRVLRVSKEKLKDKGISSIWERVTTLEREGVKLSRWEAYELLKESFSNAFELEEGELTDYELELAEKLIEEKYRNPKWNEMR

SEQ ID NO: 1883 - protein, 315 aa, Thermococcus kodakaraensis KOD1
  misc_feature (321437)..(321437): n is a or c or g or t.
  misc_feature (52783)..(527833): n is a or c or g or t.
  misc_feature (527901)..(527901): n is a or c or g or t.
  misc_feature (527978)..(527978): n is a or c or g or t.
  misc_feature (960838)..(960839): n is a or c or g or t.
  misc_feature (960860)..(960861): n is a or c or g or t.
  misc_feature (960872)..(960873): n is a or c or g or t.
  misc_feature (960879)..(960879): n is a or c or g or t.
  misc_feature (960890)..(960890): n is a or c or g or t.
  misc_feature (1250239)..(1250239): n is a or c or g or t.
  misc_feature (1302432)..(1302434): n is a or c or g or t.
  misc_feature (1302471)..(1302471): n is a or c or g or t.
  misc_feature (1302488)..(1302488): n is a or c or g or t.
  misc_feature (1674836)..(1674836): n is a or c or g or t.
MRIGFLTSGRTSLTGFPFSILSPPENFSFQRLLNFRSLVSTGKATLILSKRPINTVMTMPRIGIIGGSGVYGVFEPKETVKVHTPYGRPSAPVEIGEIEGVEVAFIPRHGKHHEFPPHEVPYRANIWALKELGVERVIGITAVGSLREEYKPGDIVITDQFIDFTKKRDYTFYNGPRVAHVSMADPFCPEMRKIFYETAKELGFPVHEKGTYVCIEGPRFSTRAESFMFRQFAHIIGMTLVPEVNLARELGMCYVNIATVTDYDVWADKPVDAQEVLKVMAENNYKVQELLKKGIPKIPEERHCGCADVLKTMFV

SEQ ID NO: 1884 - protein, 50 aa, Thermococcus kodakaraensis KOD1
  misc_feature (321437)..(321437): n is a or c or g or t.
  misc_feature (52783)..(527833): n is a or c or g or t.
  misc_feature (527901)..(527901): n is a or c or g or t.
  misc_feature (527978)..(527978): n is a or c or g or t.
  misc_feature (960838)..(960839): n is a or c or g or t.
  misc_feature (960860)..(960861): n is a or c or g or t.
  misc_feature (960872)..(960873): n is a or c or g or t.
  misc_feature (960879)..(960879): n is a or c or g or t.
  misc_feature (960890)..(960890): n is a or c or g or t.
  misc_feature (1250239)..(1250239): n is a or c or g or t.
  misc_feature (1302432)..(1302434): n is a or c or g or t.
  misc_feature (1302471)..(1302471): n is a or c or g or t.
  misc_feature (1302488)..(1302488): n is a or c or g or t.
  misc_feature (1674836)..(1674836): n is a or c or g or t.
VLAALFASIATEVERVFILKQREIKIRDFVLDFIAFVGALYMVSLLLKVG

SEQ ID NO: 1885 - protein, 248 aa, Thermococcus kodakaraensis KOD1
  misc_feature (321437)..(321437): n is a or c or g or t.
  misc_feature (52783)..(527833): n is a or c or g or t.
  misc_feature (527901)..(527901): n is a or c or g or t.
  misc_feature (527978)..(527978): n is a or c or g or t.
  misc_feature (960838)..(960839): n is a or c or g or t.
  misc_feature (960860)..(960861): n is a or c or g or t.
  misc_feature (960872)..(960873): n is a or c or g or t.
  misc_feature (960879)..(960879): n is a or c or g or t.
  misc_feature (960890)..(960890): n is a or c or g or t.
  misc_feature (1250239)..(1250239): n is a or c or g or t.
  misc_feature (1302432)..(1302434): n is a or c or g or t.
  misc_feature (1302471)..(1302471): n is a or c or g or t.
  misc_feature (1302488)..(1302488): n is a or c or g or t.
  misc_feature (1674836)..(1674836): n is a or c or g or t.
MKLKWAIILSLVVIPVVLSGCINSAHSVEEIASYRILKLYGLWEKLPESVRHYIELGLEGKAEETLKEDLPNVHNFLIASNVLVCEAAQRKAKELGLEAHILTTTLEGEAREVALAFGSVIEEIYHRNRPFKRPCVLIAGGETTVTIEGKAGLGGPNQEFALSIARKISGLRGVAVLAMDTDGTDGPTDAAGGLVDSHTAEVLRNEGIDLEEYLRSHNAYEALKKAKALVVTGPTRTNVNSIVIGVIL

SEQ ID NO: 1886 - protein, 427 aa, Thermococcus kodakaraensis KOD1
  misc_feature (321437)..(321437): n is a or c or g or t.
  misc_feature (52783)..(527833): n is a or c or g or t.
  misc_feature (527901)..(527901): n is a or c or g or t.
  misc_feature (527978)..(527978): n is a or c or g or t.
  misc_feature (960838)..(960839): n is a or c or g or t.
  misc_feature (960860)..(960861): n is a or c or g or t.
  misc_feature (960872)..(960873): n is a or c or g or t.
  misc_feature (960879)..(960879): n is a or c or g or t.
  misc_feature (960890)..(960890): n is a or c or g or t.
  misc_feature (1250239)..(1250239): n is a or c or g or t.
  misc_feature (1302432)..(1302434): n is a or c or g or t.
  misc_feature (1302471)..(1302471): n is a or c or g or t.
  misc_feature (1302488)..(1302488): n is a or c or g or t.
  misc_feature (1674836)..(1674836): n is a or c or g or t.
VVPMSILIKNGHVIYGENLDVVRADVLIESNRIVSVERNINEAADTVIDATGRVVSPGFINLHTHSPMGLLRGLADDLPLMEWLQNHIWPREAKLTPEYVKVGAYLGALEMIRSGTTTFLDMYFHMDKVAEAVLDAGLRGYLSYGMIDLGDPDRTEKELKEALREMEAIEKLNSERVHFVFGPHAPYTCSIALLKEVRKLASEHNKLITIHVSETMAEIGQITERYGKSPVVLLDDIGFLGNDVIIAHGVWLDSRDIQILARHGVTVAHNPGSNMKLASGVMPLEKLLNAGVNIGLGTDGSASNNNLDMLEEMKLAALLHKVHNLDPTIADARTVFRMATQNGAKALRLNAGIIKEGYLADIAIINFNRPHLRPINDVISHLVYSANGNDVETTIVDGKILMLDGEVLTLDEEKVISEAEKVSEKLA

SEQ ID NO: 1887 - protein, 183 aa, Thermococcus kodakaraensis KOD1
  misc_feature (321437)..(321437): n is a or c or g or t.
  misc_feature (52783)..(527833): n is a or c or g or t.
  misc_feature (527901)..(527901): n is a or c or g or t.
  misc_feature (527978)..(527978): n is a or c or g or t.
  misc_feature (960838)..(960839): n is a or c or g or t.
  misc_feature (960860)..(960861): n is a or c or g or t.
  misc_feature (960872)..(960873): n is a or c or g or t.
  misc_feature (960879)..(960879): n is a or c or g or t.
  misc_feature (960890)..(960890): n is a or c or g or t.
  misc_feature (1250239)..(1250239): n is a or c or g or t.
  misc_feature (1302432)..(1302434): n is a or c or g or t.
  misc_feature (1302471)..(1302471): n is a or c or g or t.
  misc_feature (1302488)..(1302488): n is a or c or g or t.
  misc_feature (1674836)..(1674836): n is a or c or g or t.
VVVVVEFEIVKGDITRFPAEAIVNAANRYLEHGGGVAYAIAKAAAGDPREYIRISKEAMREQLGKDHIEHGEVVVTPAMRLEKHGIRYVIHTVGPYCGGIWDEDKKEKLRKAILGALRKAEELGVKTIAFPAVSAGIYGCPLEEVVKTFKEVIDEFEREAGSVERVYLVLYSEKDYERALRAV

SEQ ID NO: 1888 - protein, 479 aa, Thermococcus kodakaraensis KOD1
  misc_feature (321437)..(321437): n is a or c or g or t.
  misc_feature (52783)..(527833): n is a or c or g or t.
  misc_feature (527901)..(527901): n is a or c or g or t.
  misc_feature (527978)..(527978): n is a or c or g or t.
  misc_feature (960838)..(960839): n is a or c or g or t.
  misc_feature (960860)..(960861): n is a or c or g or t.
  misc_feature (960872)..(960873): n is a or c or g or t.
  misc_feature (960879)..(960879): n is a or c or g or t.
  misc_feature (960890)..(960890): n is a or c or g or t.
  misc_feature (1250239)..(1250239): n is a or c or g or t.
  misc_feature (1302432)..(1302434): n is a or c or g or t.
  misc_feature (1302471)..(1302471): n is a or c or g or t.
  misc_feature (1302488)..(1302488): n is a or c or g or t.
  misc_feature (1674836)..(1674836): n is a or c or g or t.
MPEKASEVISVETPNLDFLFYPKSVAVIGASNVPGKVGNAIMRSITLRFDGKVYPVNVKGGEIEVNGKKFKVYRSVKEIPDEVDVAVIAVPAKFVPDVIDECGEKGVKAAVVISAGFKEAGRADLEEELVRRARKWGIRVVGPNCLGVTNLENGFDCNFNPPERQARPPFGKVAFMSQSGAFGAAILDWAASHKIGMSKFISLGNMADLDESDFMAYLGDDPKTGVITGYIEGVKDGRKFFNTAKEVTLKKPVVVLKSGRTEAGAKAAASHTGSLAGSYKIYQAAFEQTGVLEAKSMRQLFNYAKALAMQSPAKGDRVAIVTNGGGAGVMMSDGLLERGMKLAELSEETNERFKKDIEEGKLPAHMSYKNPIDVIGDAPSSRYEIAMRYALEDPNVDVLVVIALFQSPALDEGIVDAMERMKVYGKPIVFVAPGGDYPHKMARNIELKGIPVYETVEDGVDAVYALVKYGEWLRENGRL

SEQ ID NO: 1889 - protein, 354 aa, Thermococcus kodakaraensis KOD1
  misc_feature (321437)..(321437): n is a or c or g or t.
  misc_feature (52783)..(527833): n is a or c or g or t.
  misc_feature (527901)..(527901): n is a or c or g or t.
  misc_feature (527978)..(527978): n is a or c or g or t.
  misc_feature (960838)..(960839): n is a or c or g or t.
  misc_feature (960860)..(960861): n is a or c or g or t.
  misc_feature (960872)..(960873): n is a or c or g or t.
  misc_feature (960879)..(960879): n is a or c or g or t.
  misc_feature (960890)..(960890): n is a or c or g or t.
  misc_feature (1250239)..(1250239): n is a or c or g or t.
  misc_feature (1302432)..(1302434): n is a or c or g or t.
  misc_feature (1302471)..(1302471): n is a or c or g or t.
  misc_feature (1302488)..(1302488): n is a or c or g or t.
  misc_feature (1674836)..(1674836): n is a or c or g or t.
VMSMGFIEFLEKLGGKTLEVAEKPMRRLPEGKNVQERLKALKELQKELEREKEQKDERETFIEAVIEQRKEEVQQPFAQRLASAILKYFRGPVERLTTSLSGLDVDLYRANITMSKEAYVAYMLGVAMITAFFGFVFAYLMYLPIDISLLAGFLGFLGGFFYMRYYPKMVWKRRVREVEKALPYALRHIASLLSAGVGIAEAMLSVAKADYGPLSEEFELVIRDMRTGSSFEEAMLKFEEKMASENVSRVVKQILRAVKFGGNLAEILYKLAEDFAFEYRMKLVEYVQKVNGISFVYMFMTIVMPTMLVVGILAGSLMARKLIFSVPMIAIMLVVVFPMMSFMIINMIKSAEPR

SEQ ID NO: 1890 - protein, 74 aa, Thermococcus kodakaraensis KOD1
  misc_feature (321437)..(321437): n is a or c or g or t.
  misc_feature (52783)..(527833): n is a or c or g or t.
  misc_feature (527901)..(527901): n is a or c or g or t.
  misc_feature (527978)..(527978): n is a or c or g or t.
  misc_feature (960838)..(960839): n is a or c or g or t.
  misc_feature (960860)..(960861): n is a or c or g or t.
  misc_feature (960872)..(960873): n is a or c or g or t.
  misc_feature (960879)..(960879): n is a or c or g or t.
  misc_feature (960890)..(960890): n is a or c or g or t.
  misc_feature (1250239)..(1250239): n is a or c or g or t.
  misc_feature (1302432)..(1302434): n is a or c or g or t.
  misc_feature (1302471)..(1302471): n is a or c or g or t.
  misc_feature (1302488)..(1302488): n is a or c or g or t.
  misc_feature (1674836)..(1674836): n is a or c or g or t.
VLWLEALGIPYQESWTHWEHAEHVNYMRNFYSELVRLFEKAKYAPAKIGWEDAERAFEIYLRLRGKAYELAGVN

SEQ ID NO: 1891 - protein, 350 aa, Thermococcus kodakaraensis KOD1
  misc_feature (321437)..(321437): n is a or c or g or t.
  misc_feature (52783)..(527833): n is a or c or g or t.
  misc_feature (527901)..(527901): n is a or c or g or t.
  misc_feature (527978)..(527978): n is a or c or g or t.
  misc_feature (960838)..(960839): n is a or c or g or t.
  misc_feature (960860)..(960861): n is a or c or g or t.
  misc_feature (960872)..(960873): n is a or c or g or t.
  misc_feature (960879)..(960879): n is a or c or g or t.
  misc_feature (960890)..(960890): n is a or c or g or t.
  misc_feature (1250239)..(1250239): n is a or c or g or t.
  misc_feature (1302432)..(1302434): n is a or c or g or t.
  misc_feature (1302471)..(1302471): n is a or c or g or t.
  misc_feature (1302488)..(1302488): n is a or c or g or t.
  misc_feature (1674836)..(1674836): n is a or c or g or t.
VPHDRFLEEEEVEVELHVVPEFDVENLVVRDLVPEELEVVSGNPEKVFCLSAGEEGILRYRVRMKRGVHNFEGVRVSYRDPLGFFSGDVLVELFTEVVGVPRIYDIPTPYSTRGTKITIGPLPSPRLGEGLEFHAVREYRPGDPLKIINWKATARTGEIMANEFESERKVDVVFVVDASRANAPVLDYQVRAAASLMLNALNDGTSFGLLLAEETPLWVRVDYGKRHFFKCVDFLSTAKPGSNDIILYQVEHLARVAFPLRAQIVYFSPLLTSESRETLRILGEMGYKVVVISPNPNSLYTPSTEEEEVAMRLVELRRKALLRELSTYGLIIDWDVKKPLKAAIAEVIKV

SEQ ID NO: 1892 - protein, 209 aa, Thermococcus kodakaraensis KOD1
  misc_feature (321437)..(321437): n is a or c or g or t.
  misc_feature (52783)..(527833): n is a or c or g or t.
  misc_feature (527901)..(527901): n is a or c or g or t.
  misc_feature (527978)..(527978): n is a or c or g or t.
  misc_feature (960838)..(960839): n is a or c or g or t.
  misc_feature (960860)..(960861): n is a or c or g or t.
  misc_feature (960872)..(960873): n is a or c or g or t.
  misc_feature (960879)..(960879): n is a or c or g or t.
  misc_feature (960890)..(960890): n is a or c or g or t.
  misc_feature (1250239)..(1250239): n is a or c or g or t.
  misc_feature (1302432)..(1302434): n is a or c or g or t.
  misc_feature (1302471)..(1302471): n is a or c or g or t.
  misc_feature (1302488)..(1302488): n is a or c or g or t.
  misc_feature (1674836)..(1674836): n is a or c or g or t.
VVQMKVLVTGFEPFGGEEINPSWEAVKGLPNEIEGADIIKFQLPVTFSGVREILPRLIVKERPDAVILTGQAGGRPNITVERVAINVMDSTMPDNEGYKPEDEPVFEGAPAAYFATIPVKAIVKALREAKIPAAVSNTAGTYVCNAAMFTALHTIEVSGMTTKAGFIHVPFSHEQALDKPRPSMALETIRKGLEIAIKMVFEDLTREGY

SEQ ID NO: 1893 - protein, 654 aa, Thermococcus kodakaraensis KOD1
  misc_feature (321437)..(321437): n is a or c or g or t.
  misc_feature (52783)..(527833): n is a or c or g or t.
  misc_feature (527901)..(527901): n is a or c or g or t.
  misc_feature (527978)..(527978): n is a or c or g or t.
  misc_feature (960838)..(960839): n is a or c or g or t.
  misc_feature (960860)..(960861): n is a or c or g or t.
  misc_feature (960872)..(960873): n is a or c or g or t.
  misc_feature (960879)..(960879): n is a or c or g or t.
  misc_feature (960890)..(960890): n is a or c or g or t.
  misc_feature (1250239)..(1250239): n is a or c or g or t.
  misc_feature (1302432)..(1302434): n is a or c or g or t.
  misc_feature (1302471)..(1302471): n is a or c or g or t.
  misc_feature (1302488)..(1302488): n is a or c or g or t.
  misc_feature (1674836)..(1674836): n is a or c or g or t.
VVSWFNGKLERKGEFTLYRLIRFIQAKRPDIVAIDSVTELGDDLRKFLRALPPGTKLVQVTGKPGEQRTLQSLAKEHGIRTGDRFDPYEEAKVAALLASKGVGYEVLAFEDEVIVKVTRGRSHGKGGWSQDRYRKRVHNLVRDKVREIEDRLRRADIPFDLETEEKDYGLARGEFRVYASREELAGLIRPMRGGDVEVRIQPVERAELGFAPLKKEEAIRERKSIIVGIDPGITVGIAAIDLDGRIVALHSERNMPVGEVFRFISEIGHPVIIATDVSPAPGFVEKIARSFKAQLFVPRESLRVEEKNELLRDLGITVDDDHQRDALAAAYKAYLRIKPKLEHIDARLREAGLTKKSDEVKALVIAGYNLGEAMQRVTLRERKKEEEKEEPETEKSFDAEPYLKRIRELERRIELLERENEELREIIKEQRKTIGRLERKIADYDEEVRRKVLRERELEAKVRRIEVLEKQLREAKAVIERLSRDLVQVKRMNVVEVRGSAVPLKVLRVLSWGELDRIEREVGLRKGDVLFVINPAGAGKAIAEELVEKGIRAIITEKPLPEVVKEVLREAHLPFFTSEELDVKRVDEFAVVERETLEKAIEELLKRWEEEDREREAEKLLRLVEEYRIERARELERKAREELEGEKRRKREGF

SEQ ID NO: 1894 - protein, 445 aa, Thermococcus kodakaraensis KOD1
  misc_feature (321437)..(321437): n is a or c or g or t.
  misc_feature (52783)..(527833): n is a or c or g or t.
  misc_feature (527901)..(527901): n is a or c or g or t.
  misc_feature (527978)..(527978): n is a or c or g or t.
  misc_feature (960838)..(960839): n is a or c or g or t.
  misc_feature (960860)..(960861): n is a or c or g or t.
  misc_feature (960872)..(960873): n is a or c or g or t.
  misc_feature (960879)..(960879): n is a or c or g or t.
  misc_feature (960890)..(960890): n is a or c or g or t.
  misc_feature (1250239)..(1250239): n is a or c or g or t.
  misc_feature (1302432)..(1302434): n is a or c or g or t.
  misc_feature (1302471)..(1302471): n is a or c or g or t.
  misc_feature (1302488)..(1302488): n is a or c or g or t.
  misc_feature (1674836)..(1674836): n is a or c or g or t.
VRDLRRKVSIALLVLMAVFLMADQNLLPPNYQLIMEEFGISEAKMGLVSSIFVATSALITIIWGFLSDIKQRKKLLVIGVLLGEIPCFLTAYVTNYWQLLAMRFLTGIGIGSIIPIGYSLIADMFEESKRGRGYAYMETAFGFGTLLGMIMAGMIAGWRLPFILAAVPNFILAPLFYFIAEEPKRGEGEKELREVLEKGYEYRYRISWEAVKKSFETKTNQLIFLQGIIGTVPWGIIMYWLISFLQVTRGMDKTTSTFVLLIIGISSVLGSLMGGFLGDYFEARWRGGRAILTGAAIFIGMLASIGIILYPLPSQLTAKDWAFIAVYSLLFIQFVSYAGPNVRAIVSQVNLPEDRGTIFGLFNILDNVGKATGPLLGGLMIEWLRGMGYSKPLAYQYTLLIGALFWIPCALTWLWIKKTYPEDRDAVKAILKKRAEELLSKAPAN

SEQ ID NO: 1895 - protein, 22 aa, Thermococcus kodakaraensis KOD1
  misc_feature (321437)..(321437): n is a or c or g or t.
  misc_feature (52783)..(527833): n is a or c or g or t.
  misc_feature (527901)..(527901): n is a or c or g or t.
  misc_feature (527978)..(527978): n is a or c or g or t.
  misc_feature (960838)..(960839): n is a or c or g or t.
  misc_feature (960860)..(960861): n is a or c or g or t.
  misc_feature (960872)..(960873): n is a or c or g or t.
  misc_feature (960879)..(960879): n is a or c or g or t.
  misc_feature (960890)..(960890): n is a or c or g or t.
  misc_feature (1250239)..(1250239): n is a or c or g or t.
  misc_feature (1302432)..(1302434): n is a or c or g or t.
  misc_feature (1302471)..(1302471): n is a or c or g or t.
  misc_feature (1302488)..(1302488): n is a or c or g or t.
  misc_feature (1674836)..(1674836): n is a or c or g or t.
MQMFDIGYVVVAMENILTSSPP

SEQ ID NO: 1896 - protein, 815 aa, Thermococcus kodakaraensis KOD1
  misc_feature (321437)..(321437): n is a or c or g or t.
  misc_feature (52783)..(527833): n is a or c or g or t.
  misc_feature (527901)..(527901): n is a or c or g or t.
  misc_feature (527978)..(527978): n is a or c or g or t.
  misc_feature (960838)..(960839): n is a or c or g or t.
  misc_feature (960860)..(960861): n is a or c or g or t.
  misc_feature (960872)..(960873): n is a or c or g or t.
  misc_feature (960879)..(960879): n is a or c or g or t.
  misc_feature (960890)..(960890): n is a or c or g or t.
  misc_feature (1250239)..(1250239): n is a or c or g or t.
  misc_feature (1302432)..(1302434): n is a or c or g or t.
  misc_feature (1302471)..(1302471): n is a or c or g or t.
  misc_feature (1302488)..(1302488): n is a or c or g or t.
  misc_feature (1674836)..(1674836): n is a or c or g or t.
MSRKVLGLFVMGLMLFSLAVVPSVKPVAAADSDSVLKTVIYSSSGALFMGVWNPSSSGYSDTYSRRIADLVFDSGIPYGIDGVPHPYHCHVVDYKSDVTVPEDAVIFNSTTDTWVAAHAGETAKTYARIECDRPYFHDGHKLSAADVMYSLAWSWEWTTQDGDDDPYYDASEADWSGEYMNTILGIKLVEQTDDRMVFDVYHNHYFPASEIMTAAYVVPFTGTPWQLWYAMSELVAHNPKYSWSESSEDVEQLDQINPSHAQAIKEKLLELKQSKPIPEFLKPYIEDENAATAAYDSIAKFIDEHNHAVIGQGPYYVDEYQPENLFVRIKKFDKWTIPAFAEPEYQVDPYYKTIEVYGIQNEDTAILEVANGHYDILWYPFAAYRFTGLSDEQRANIKLYRSTSAFGDIVWNPVHDQDNPYVITVGDKKYFNPFAVRKVRFAIQYLVNRAYITQNIFQGSAGPMFTPWTSTETGFEYVRPVVDAFGLTEQSDEDLAMKLFEEGMQEAAQELAKMGYELKKGDDGKWYFNGEPVKVVGLGRVEDERKDVATYIVEEVLKKLGFDAEAKIVDRRTASGTVYTSDPSSYQWNFYTEGWVSSSNVKFSTTRIIQYYSSYWYAPGLVGWKWTPENTQRVTLEEVLKFLGNGDIQAGLDSLGLSYYNTVDKIQPLLNWTADDFALVIYSGEANGVKMDSEDKYWDFNRLGTAIGIYEGYRTFLYENWEFYAASKDIEIKLVDPVAGLASDWAIRSARPVGETKTETQTTTTTSETETSTQTTSETETQTTTTETSEEGGGICGPAFLVGLAVVPLLLRRRR

SEQ ID NO: 1897 - protein, 349 aa, Thermococcus kodakaraensis KOD1
  misc_feature (321437)..(321437): n is a or c or g or t.
  misc_feature (52783)..(527833): n is a or c or g or t.
  misc_feature (527901)..(527901): n is a or c or g or t.
  misc_feature (527978)..(527978): n is a or c or g or t.
  misc_feature (960838)..(960839): n is a or c or g or t.
  misc_feature (960860)..(960861): n is a or c or g or t.
  misc_feature (960872)..(960873): n is a or c or g or t.
  misc_feature (960879)..(960879): n is a or c or g or t.
  misc_feature (960890)..(960890): n is a or c or g or t.
  misc_feature (1250239)..(1250239): n is a or c or g or t.
  misc_feature (1302432)..(1302434): n is a or c or g or t.
  misc_feature (1302471)..(1302471): n is a or c or g or t.
  misc_feature (1302488)..(1302488): n is a or c or g or t.
  misc_feature (1674836)..(1674836): n is a or c or g or t.
MGFGRYVLIRILNALIVLTLVTLVMSALFVKVAEKDLQNRIIEQVNAEFQALQKQGRAPENPDQWRAERIAYYRHEYKLDRSYAWRVMYYFKRTITFDFGNTRNPVFGSERDVKAILKRAIPRTIQLFTTAQIIIIFLGILLGVKAAQKVGSAFDRALSVLALVTSSIPMWWFGMIMLLIFAFELGWFPARSIPDPNLTGWAHIVDMLKRMVLPVATIVFVSFGAWAWVIRNIMIGTMQEDFIMAARAKGVPERKVIYGHALRAAAPPVVTMIIMSLLGSLGGAIITESVFTWPGMGRVYWIALETNETNLIMGLTFVNVILYLAGVILADLTYGFLDPRVKVGASQNV

SEQ ID NO: 1898 - protein, 102 aa, Thermococcus kodakaraensis KOD1
  misc_feature (321437)..(321437): n is a or c or g or t.
  misc_feature (52783)..(527833): n is a or c or g or t.
  misc_feature (527901)..(527901): n is a or c or g or t.
  misc_feature (527978)..(527978): n is a or c or g or t.
  misc_feature (960838)..(960839): n is a or c or g or t.
  misc_feature (960860)..(960861): n is a or c or g or t.
  misc_feature (960872)..(960873): n is a or c or g or t.
  misc_feature (960879)..(960879): n is a or c or g or t.
  misc_feature (960890)..(960890): n is a or c or g or t.
  misc_feature (1250239)..(1250239): n is a or c or g or t.
  misc_feature (1302432)..(1302434): n is a or c or g or t.
  misc_feature (1302471)..(1302471): n is a or c or g or t.
  misc_feature (1302488)..(1302488): n is a or c or g or t.
  misc_feature (1674836)..(1674836): n is a or c or g or t.
VMWSDNASVLLSLGGEDLEYVLNNGNVSVDVQSAPQITVLDGDLEYEYVVYWFDYPYSYLTYPAFFLMIIGGVFAFRGYISFLETLKEDMKKQKGDAKNESP

SEQ ID NO: 1899 - protein, 252 aa, Thermococcus kodakaraensis KOD1
  misc_feature (321437)..(321437): n is a or c or g or t.
  misc_feature (52783)..(527833): n is a or c or g or t.
  misc_feature (527901)..(527901): n is a or c or g or t.
  misc_feature (527978)..(527978): n is a or c or g or t.
  misc_feature (960838)..(960839): n is a or c or g or t.
  misc_feature (960860)..(960861): n is a or c or g or t.
  misc_feature (960872)..(960873): n is a or c or g or t.
  misc_feature (960879)..(960879): n is a or c or g or t.
  misc_feature (960890)..(960890): n is a or c or g or t.
  misc_feature (1250239)..(1250239): n is a or c or g or t.
  misc_feature (1302432)..(1302434): n is a or c or g or t.
  misc_feature (1302471)..(1302471): n is a or c or g or t.
  misc_feature (1302488)..(1302488): n is a or c or g or t.
  misc_feature (1674836)..(1674836): n is a or c or g or t.
VIGMTGEWTVPRVKSGIPGFDELVNGGFPKGTTVLVTGPTGSGKTTFAVQFVYKGVELYDEPGVIVTLEERAVDLRREMRAFGWDIEKYEKEGKIAIIDGVSAVVGLPSEEQYVLEGNLNTEDFLRYIYRVVKAIDAKRLVIDSIPSIAFRLKKEEEIREVLLQLNTILLEMGVTSILTTEAPEPSRGKISRYGIEEYIARGVVLLDFIEREVELKRYLLIRKMRETKHSMKKYPFEIMSDGLVVYPSGEIY

SEQ ID NO: 1900 - protein, 309 aa, Thermococcus kodakaraensis KOD1
  misc_feature (321437)..(321437): n is a or c or g or t.
  misc_feature (52783)..(527833): n is a or c or g or t.
  misc_feature (527901)..(527901): n is a or c or g or t.
  misc_feature (527978)..(527978): n is a or c or g or t.
  misc_feature (960838)..(960839): n is a or c or g or t.
  misc_feature (960860)..(960861): n is a or c or g or t.
  misc_feature (960872)..(960873): n is a or c or g or t.
  misc_feature (960879)..(960879): n is a or c or g or t.
  misc_feature (960890)..(960890): n is a or c or g or t.
  misc_feature (1250239)..(1250239): n is a or c or g or t.
  misc_feature (1302432)..(1302434): n is a or c or g or t.
  misc_feature (1302471)..(1302471): n is a or c or g or t.
  misc_feature (1302488)..(1302488): n is a or c or g or t.
  misc_feature (1674836)..(1674836): n is a or c or g or t.
VLQWRVPPLRADGRDCRQCLIYPLGDTLTSAKELGGVPLIEITFLGSGGGRFITITQFRSTGGFHIAASRNIYVDPGPGALVRSWRYKLDPRKLDAIFVSHRHVDHCNDLEVMVEAMTGGALKKRGVLIASKSVVYGDEEHTPAISQYHINVLESVHIPEPGSKISIGDEELLITPSKHSDPTTIGFRMRTSLGDISYIPDTAYFDDLVRWHDGARVLIAAITRPRDMGIPYHLSTDDAVEMLKSMEKKPEVLVMSHIGMKMHFANPYKEAKYIENVTGVKTYVAKEGFRITVNKKEIAVRTLRPARFV

SEQ ID NO: 1901 - protein, 363 aa, Thermococcus kodakaraensis KOD1
  misc_feature (321437)..(321437): n is a or c or g or t.
  misc_feature (52783)..(527833): n is a or c or g or t.
  misc_feature (527901)..(527901): n is a or c or g or t.
  misc_feature (527978)..(527978): n is a or c or g or t.
  misc_feature (960838)..(960839): n is a or c or g or t.
  misc_feature (960860)..(960861): n is a or c or g or t.
  misc_feature (960872)..(960873): n is a or c or g or t.
  misc_feature (960879)..(960879): n is a or c or g or t.
  misc_feature (960890)..(960890): n is a or c or g or t.
  misc_feature (1250239)..(1250239): n is a or c or g or t.
  misc_feature (1302432)..(1302434): n is a or c or g or t.
  misc_feature (1302471)..(1302471): n is a or c or g or t.
  misc_feature (1302488)..(1302488): n is a or c or g or t.
  misc_feature (1674836)..(1674836): n is a or c or g or t.
VVVVHTAGAHHNLDHNGAVLHQPRYGGSVQSEAQEGWRMTAILDVRNLKVYYRTPMGFVKAVDGVSFDVRKGEVFGIAGESGCGKSTLVHSLILRKPPMIHMGGEAIFKGRDLMKLSKEEERKIKYTELSIIPQYAMNALNPTKKIKDIVWDLAREHGAEDREEVEKLLRERLRMVKLSDKVADMYPVELSGGMRQRATMVVSTLMNPDLLIADEITSALDVTTQRVVLELLHYFMKEGIVKSIIFVTHDLALLDKIADRVMVLYAGKVAEIGPTEEIIDSPAHPYTSLLIESLPKIGVHYKRAKLKGIPGTPISLLNPPKGCRFYPRCPYAMEVCQRVEPGVFSVGDDHIVACHLYGGEKNE

SEQ ID NO: 1902 - protein, 790 aa, Thermococcus kodakaraensis KOD1
  misc_feature (321437)..(321437): n is a or c or g or t.
  misc_feature (52783)..(527833): n is a or c or g or t.
  misc_feature (527901)..(527901): n is a or c or g or t.
  misc_feature (527978)..(527978): n is a or c or g or t.
  misc_feature (960838)..(960839): n is a or c or g or t.
  misc_feature (960860)..(960861): n is a or c or g or t.
  misc_feature (960872)..(960873): n is a or c or g or t.
  misc_feature (960879)..(960879): n is a or c or g or t.
  misc_feature (960890)..(960890): n is a or c or g or t.
  misc_feature (1250239)..(1250239): n is a or c or g or t.
  misc_feature (1302432)..(1302434): n is a or c or g or t.
  misc_feature (1302471)..(1302471): n is a or c or g or t.
  misc_feature (1302488)..(1302488): n is a or c or g or t.
  misc_feature (1674836)..(1674836): n is a or c or g or t.
VVMGMGKVEFSGKRYVIDGEPVTIAGGTLQFFRVPADAWKDRLLKMREAGLNTVDTYVAWNWHEPEKGSFDFKGETHPQRNLVGFLELADELGFYVIIRPGPYICGEWRNGGIPDWLIDEHPEILAKGPNGPLPRDIYYPPITYLHPTYLEAVGEWYNAVFPVIRKYLYTNGGPIISVSIDDEPSYWETIFQPFLTDYNEIITKPGGLWEKWLEQNYTLEDLRRRYKGDFKDYSEIKVPTSFSEPLPKLIDWHHFKLWMINEYVRWIYERMAREFDVPISILDPYLLQVAWRHFFTYMREHNLKIHVWTEFWYSFYRSSDFKEDKLGHIYYKTGIYRYHVRKAGTPPLSIETQSSLAHTIDPTEAELLYSILPPLGIPNINYYLFVGGENPEGYESHNGITWDVYSPVGLDGSERPHFGVIKALSETMTSAEGLADAELRPKVAVGLYEPYEALNLWGYEGLEESTDLNEYLLGERGLFTLLAMSNTPFDAVDLEDVTLDELLSYDQLWVYSLDFMSREVQDKLVEFVARGGNLVILPMLPRYDENLEPYSSLKDFLGVEVEREKARRNPRLIQFLSVSAEGIDRMLVRNTVRGVRGGEPIAFLGEKPVGAFVRKGGGSAVVLGFRLQYYTSHHDLHRKFVWKLKELQGVREDFEVTNPDMIVLPMEGKGYAYLAVTNPRGHPIKGRISYRGLEVPVLLDGIELKRRGTLYLPFGVRKGDVEVAYATATLVMWEGDVLTFRNHLSGHSEIALKGVESVKVSGGKIVDGSDGEVLRIVIEHPGEYFEVELL

SEQ ID NO: 1903 - protein, 419 aa, Thermococcus kodakaraensis KOD1
  misc_feature (321437)..(321437): n is a or c or g or t.
  misc_feature (52783)..(527833): n is a or c or g or t.
  misc_feature (527901)..(527901): n is a or c or g or t.
  misc_feature (527978)..(527978): n is a or c or g or t.
  misc_feature (960838)..(960839): n is a or c or g or t.
  misc_feature (960860)..(960861): n is a or c or g or t.
  misc_feature (960872)..(960873): n is a or c or g or t.
  misc_feature (960879)..(960879): n is a or c or g or t.
  misc_feature (960890)..(960890): n is a or c or g or t.
  misc_feature (1250239)..(1250239): n is a or c or g or t.
  misc_feature (1302432)..(1302434): n is a or c or g or t.
  misc_feature (1302471)..(1302471): n is a or c or g or t.
  misc_feature (1302488)..(1302488): n is a or c or g or t.
  misc_feature (1674836)..(1674836): n is a or c or g or t.
MKLKNRSLGILLMFLILGMTLLNTESYVFGDPALEVAKSSTKVLPQVSRNVALYLAKNELNSFPFMDFKGAEIGKKLVLFYFPDGRPAYYEVPLLKDGKVVGVMFIPALKTMPPGWMQVFEARKLVSQQLDKIAETIGIKHYRYVVLGAAMFGIQTEDGTVVDLAGREYRIDPSASFRFSIESKKNEVLWVKLEKDALKSSPRKIIEGVPTWTSTDTGNANIGYPNNVGPAPDPWGDWDGCSPIAASMVVAYYDSQFRSAYMREAIIDILHFTMGTDSSGRTEANGITKGIEDFYWEVMKLYNDGHLSVHPTYSYDATNREYSSDYQLFLAIKGEVDKNHPGLLNVHWRLRNGSIVGHSMTFVGYDSSVPAIYVHTTWKDLPAGWIKVGNWVDAMITTVKPIKMCWNGICPYVAVTSGG

SEQ ID NO: 1904 - protein, 50 aa, Thermococcus kodakaraensis KOD1
  misc_feature (321437)..(321437): n is a or c or g or t.
  misc_feature (52783)..(527833): n is a or c or g or t.
  misc_feature (527901)..(527901): n is a or c or g or t.
  misc_feature (527978)..(527978): n is a or c or g or t.
  misc_feature (960838)..(960839): n is a or c or g or t.
  misc_feature (960860)..(960861): n is a or c or g or t.
  misc_feature (960872)..(960873): n is a or c or g or t.
  misc_feature (960879)..(960879): n is a or c or g or t.
  misc_feature (960890)..(960890): n is a or c or g or t.
  misc_feature (1250239)..(1250239): n is a or c or g or t.
  misc_feature (1302432)..(1302434): n is a or c or g or t.
  misc_feature (1302471)..(1302471): n is a or c or g or t.
  misc_feature (1302488)..(1302488): n is a or c or g or t.
  misc_feature (1674836)..(1674836): n is a or c or g or t.
VVFSKLYTKNGEYIYVECGKIDDLGLARILVVAGAKNVVAPYANPAAKKG

SEQ ID NO: 1905 - protein, 127 aa, Thermococcus kodakaraensis KOD1
  misc_feature (321437)..(321437): n is a or c or g or t.
  misc_feature (52783)..(527833): n is a or c or g or t.
  misc_feature (527901)..(527901): n is a or c or g or t.
  misc_feature (527978)..(527978): n is a or c or g or t.
  misc_feature (960838)..(960839): n is a or c or g or t.
  misc_feature (960860)..(960861): n is a or c or g or t.
  misc_feature (960872)..(960873): n is a or c or g or t.
  misc_feature (960879)..(960879): n is a or c or g or t.
  misc_feature (960890)..(960890): n is a or c or g or t.
  misc_feature (1250239)..(1250239): n is a or c or g or t.
  misc_feature (1302432)..(1302434): n is a or c or g or t.
  misc_feature (1302471)..(1302471): n is a or c or g or t.
  misc_feature (1302488)..(1302488): n is a or c or g or t.
  misc_feature (1674836)..(1674836): n is a or c or g or t.
VIGGGDLIGYYTKLAEDLGLEGNVEFLGRVSRERLISSYKSAKLLVLPSSKSEAFGMVVVEALALGTPAIVSRVGEFPVIVDDKKSGLLARLDERDIAEKILFLLEDEKMRRKMAVTGRKAIKRFIS

SEQ ID NO: 1906 - protein, 766 aa, Thermococcus kodakaraensis KOD1
  misc_feature (321437)..(321437): n is a or c or g or t.
  misc_feature (52783)..(527833): n is a or c or g or t.
  misc_feature (527901)..(527901): n is a or c or g or t.
  misc_feature (527978)..(527978): n is a or c or g or t.
  misc_feature (960838)..(960839): n is a or c or g or t.
  misc_feature (960860)..(960861): n is a or c or g or t.
  misc_feature (960872)..(960873): n is a or c or g or t.
  misc_feature (960879)..(960879): n is a or c or g or t.
  misc_feature (960890)..(960890): n is a or c or g or t.
  misc_feature (1250239)..(1250239): n is a or c or g or t.
  misc_feature (1302432)..(1302434): n is a or c or g or t.
  misc_feature (1302471)..(1302471): n is a or c or g or t.
  misc_feature (1302488)..(1302488): n is a or c or g or t.
  misc_feature (1674836)..(1674836): n is a or c or g or t.
MDFNKIFRPKIALPMITAVALILRLIPIRFRYLLGYDPYFHLAYIEEALKAGKWLNFFTIANGPWGFQMRTFHPLGLWATPAYVYKLLKIFGLSLYNAFRITPVIFGILTIAVFYWALLKLYDEKRAFFASLFLAVSFGHVFRSMAGYYRGDNYMLFWYSISLLGIAYAFSTRERLGHKSLAFYAVPALASGLAAAFWQAYYPIFVFLLASAVFLGVGDFLLGRDRYILDGILLTVSTAIGALIANYLGARVGYGMLGYDRWLSKTVAEKLSLELTTVRDAYLLFHLKYLVPLALAGLLALLALSKFIRDKRLRTLTVLVFGALAVYLLFARFEGLKDLSTGFGIFNEWPISETRPSTFHDLWSAFAVGLFLAPLFFLRFRPGKVRVQDFMLLGLVLPSLYMIKTWTRFLFIGSMGVALMAGIGLLELYEILPRFEGRKGLAVALGLLLFVPAVDTAIGFEKVAAVEPFMNEHWERALTWLGENSNENDIVLAWWDYGTWVTYYARRAPVAELAPNTGVALYYLGKRDENWAMGLGVDYVIVSYYDFLKFGTIVDTAMMCSRCNVSENYGLVVLPMVSSAGALVFRNSGYTVVARPGEKWDVKISVSGHVFGPREVYVEYGDKIIKPNITPSESGAYLYINLNYNYAILMNGEAFNTNLARLFIKPDGPYELVYSDGGIIKILRLKHPNVVVERRGGETLLQFENATGTRLGIWGFLDNGTKVFEKWYNVEGLKEFELPAEVNGTVIRYAYAEGEKILDRGVFRRD

SEQ ID NO: 1907 - protein, 177 aa, Thermococcus kodakaraensis KOD1
  misc_feature (321437)..(321437): n is a or c or g or t.
  misc_feature (52783)..(527833): n is a or c or g or t.
  misc_feature (527901)..(527901): n is a or c or g or t.
  misc_feature (527978)..(527978): n is a or c or g or t.
  misc_feature (960838)..(960839): n is a or c or g or t.
  misc_feature (960860)..(960861): n is a or c or g or t.
  misc_feature (960872)..(960873): n is a or c or g or t.
  misc_feature (960879)..(960879): n is a or c or g or t.
  misc_feature (960890)..(960890): n is a or c or g or t.
  misc_feature (1250239)..(1250239): n is a or c or g or t.
  misc_feature (1302432)..(1302434): n is a or c or g or t.
  misc_feature (1302471)..(1302471): n is a or c or g or t.
  misc_feature (1302488)..(1302488): n is a or c or g or t.
  misc_feature (1674836)..(1674836): n is a or c or g or t.
VKMFFRLTRELRDELKRPLGELVRGPIPEPYLKVRGELEKHPVVTVGDVVTENVLKIGVKPIIALYDLKTKRKEYSPEIEDTAVFLTVTNPPGTITKALLDTVRKAFGLAERGRNVHILVSGEEDLAAIPAVLYAPLGTLVLYGQPDEGVVLIKVTPECKRRCAKILASMEVVRDGD

SEQ ID NO: 1908 - protein, 38 aa, Thermococcus kodakaraensis KOD1
  misc_feature (321437)..(321437): n is a or c or g or t.
  misc_feature (52783)..(527833): n is a or c or g or t.
  misc_feature (527901)..(527901): n is a or c or g or t.
  misc_feature (527978)..(527978): n is a or c or g or t.
  misc_feature (960838)..(960839): n is a or c or g or t.
  misc_feature (960860)..(960861): n is a or c or g or t.
  misc_feature (960872)..(960873): n is a or c or g or t.
  misc_feature (960879)..(960879): n is a or c or g or t.
  misc_feature (960890)..(960890): n is a or c or g or t.
  misc_feature (1250239)..(1250239): n is a or c or g or t.
  misc_feature (1302432)..(1302434): n is a or c or g or t.
  misc_feature (1302471)..(1302471): n is a or c or g or t.
  misc_feature (1302488)..(1302488): n is a or c or g or t.
  misc_feature (1674836)..(1674836): n is a or c or g or t.
MNVFNSPIELFEKYKPTPLLRLSLSDERGDVFCQAGIL

SEQ ID NO: 1909 - protein, 303 aa, Thermococcus kodakaraensis KOD1
  misc_feature (321437)..(321437): n is a or c or g or t.
  misc_feature (52783)..(527833): n is a or c or g or t.
  misc_feature (527901)..(527901): n is a or c or g or t.
  misc_feature (527978)..(527978): n is a or c or g or t.
  misc_feature (960838)..(960839): n is a or c or g or t.
  misc_feature (960860)..(960861): n is a or c or g or t.
  misc_feature (960872)..(960873): n is a or c or g or t.
  misc_feature (960879)..(960879): n is a or c or g or t.
  misc_feature (960890)..(960890): n is a or c or g or t.
  misc_feature (1250239)..(1250239): n is a or c or g or t.
  misc_feature (1302432)..(1302434): n is a or c or g or t.
  misc_feature (1302471)..(1302471): n is a or c or g or t.
  misc_feature (1302488)..(1302488): n is a or c or g or t.
  misc_feature (1674836)..(1674836): n is a or c or g or t.
MGDKMRVIPLASESLGVRSLATFVEAGGLRILIDPGVALGPKRYGLPPAEVELKTLQQMRKKLQGYARKADIVTISHYHYDHHTPFFEGLYESSSEDYAREIYAGKILFIKHPTENINFSQRKRAWAFLKNAEAIAKKIEYADGRSFDLGGVTIEFSPAVPHGSEGSKLGFVVMVLIDDGSKRVIHASDIQLLNRRSVKWIIEKNPDLLITGGPPTYLGPRATGSWETGVKNLNEIILETNAEVILDHHIVRDKRYPEFFDELEKRPKTFAGYLKVEDRPLEAYRRELHKIEKGEGAEVPFRL

SEQ ID NO: 1910 - protein, 392 aa, Thermococcus kodakaraensis KOD1
  misc_feature (321437)..(321437): n is a or c or g or t.
  misc_feature (52783)..(527833): n is a or c or g or t.
  misc_feature (527901)..(527901): n is a or c or g or t.
  misc_feature (527978)..(527978): n is a or c or g or t.
  misc_feature (960838)..(960839): n is a or c or g or t.
  misc_feature (960860)..(960861): n is a or c or g or t.
  misc_feature (960872)..(960873): n is a or c or g or t.
  misc_feature (960879)..(960879): n is a or c or g or t.
  misc_feature (960890)..(960890): n is a or c or g or t.
  misc_feature (1250239)..(1250239): n is a or c or g or t.
  misc_feature (1302432)..(1302434): n is a or c or g or t.
  misc_feature (1302471)..(1302471): n is a or c or g or t.
  misc_feature (1302488)..(1302488): n is a or c or g or t.
  misc_feature (1674836)..(1674836): n is a or c or g or t.
MKSKYFSRGDNVLRALIIGVGQCGTKIADLFALVDFDTIALNTSRGDLEYLKHIPHDRRILIGESITGGKGVNANPLLGREAMKRDLPLVMRKIGSIVGYEDVDIFFLTFGFGGGTGAGGTPVLAEALKEEYPDSLVVAIGALPLKEEGIRPTINAAITIDKLSKVADSIIAIDNNKLKESGDDISSAYEKINYTIVERIASLLALVDVPGEQTLDASDLKFVLKAFGSFATVGYAKADASKVKNLSRLIIKSFESEGLYLDANIESALYGLVAIHGPPEVLKASDIFEALDYLTSKIRGKQIFRGFYPDPRERDVEVVTLLSGIYESKSIENIVRTAKEYARSFMQAKSEAETKKKELLTGLPDFDDVYPSLEATGSDDPEGFAEYREVSR

SEQ ID NO: 1911 - protein, 57 aa, Thermococcus kodakaraensis KOD1
  misc_feature (321437)..(321437): n is a or c or g or t.
  misc_feature (52783)..(527833): n is a or c or g or t.
  misc_feature (527901)..(527901): n is a or c or g or t.
  misc_feature (527978)..(527978): n is a or c or g or t.
  misc_feature (960838)..(960839): n is a or c or g or t.
  misc_feature (960860)..(960861): n is a or c or g or t.
  misc_feature (960872)..(960873): n is a or c or g or t.
  misc_feature (960879)..(960879): n is a or c or g or t.
  misc_feature (960890)..(960890): n is a or c or g or t.
  misc_feature (1250239)..(1250239): n is a or c or g or t.
  misc_feature (1302432)..(1302434): n is a or c or g or t.
  misc_feature (1302471)..(1302471): n is a or c or g or t.
  misc_feature (1302488)..(1302488): n is a or c or g or t.
  misc_feature (1674836)..(1674836): n is a or c or g or t.
MVSYIARSLGWGELEVLEGVKKMRERYGDLDEAILAYLFGMEKGVDMSKFRDRLPEF

SEQ ID NO: 1912 - protein, 178 aa, Thermococcus kodakaraensis KOD1
  misc_feature (321437)..(321437): n is a or c or g or t.
  misc_feature (52783)..(527833): n is a or c or g or t.
  misc_feature (527901)..(527901): n is a or c or g or t.
  misc_feature (527978)..(527978): n is a or c or g or t.
  misc_feature (960838)..(960839): n is a or c or g or t.
  misc_feature (960860)..(960861): n is a or c or g or t.
  misc_feature (960872)..(960873): n is a or c or g or t.
  misc_feature (960879)..(960879): n is a or c or g or t.
  misc_feature (960890)..(960890): n is a or c or g or t.
  misc_feature (1250239)..(1250239): n is a or c or g or t.
  misc_feature (1302432)..(1302434): n is a or c or g or t.
  misc_feature (1302471)..(1302471): n is a or c or g or t.
  misc_feature (1302488)..(1302488): n is a or c or g or t.
  misc_feature (1674836)..(1674836): n is a or c or g or t.
MPKEALIVVDMQRDFMPGGALPVPEGDTIIPKCNEYIKKFKEKGALIVATRDWHPPNHISFKERGGPWPPHCVQNTPGAEFVVDLPEDAIIISKATEPDKEAYSGFEGTNLAEILRENGVEKVYICGVATEYCVKATALDAVRHGFETYLLSDAVKGINPEDEKKALEEMKRAGVKIL

SEQ ID NO: 1913 - protein, 237 aa, Thermococcus kodakaraensis KOD1
  misc_feature (321437)..(321437): n is a or c or g or t.
  misc_feature (52783)..(527833): n is a or c or g or t.
  misc_feature (527901)..(527901): n is a or c or g or t.
  misc_feature (527978)..(527978): n is a or c or g or t.
  misc_feature (960838)..(960839): n is a or c or g or t.
  misc_feature (960860)..(960861): n is a or c or g or t.
  misc_feature (960872)..(960873): n is a or c or g or t.
  misc_feature (960879)..(960879): n is a or c or g or t.
  misc_feature (960890)..(960890): n is a or c or g or t.
  misc_feature (1250239)..(1250239): n is a or c or g or t.
  misc_feature (1302432)..(1302434): n is a or c or g or t.
  misc_feature (1302471)..(1302471): n is a or c or g or t.
  misc_feature (1302488)..(1302488): n is a or c or g or t.
  misc_feature (1674836)..(1674836): n is a or c or g or t.
VKVYWYSVVTMRIVAADTGGALLDDAYNPLGLIATVAVLVEKPYRTASLSRVKYADPFNYDMSGRQAIRDEAYLAVELAREVKPDVVHLDSTIGGIEVRKLDEPTIEALGITDRGKEVWKDLSRDLQPLAKKLWEETGIEIIAIGKWSVPVRIAEIYSGIYTAKWAIEYARKNGKVLVGLPRYMRVDIKPGEIYGESLDPREGGLFGKIETNTDGINWELYPNPLVRRYMVLEVWKE

SEQ ID NO: 1914 - protein, 257 aa, Thermococcus kodakaraensis KOD1
  misc_feature (321437)..(321437): n is a or c or g or t.
  misc_feature (52783)..(527833): n is a or c or g or t.
  misc_feature (527901)..(527901): n is a or c or g or t.
  misc_feature (527978)..(527978): n is a or c or g or t.
  misc_feature (960838)..(960839): n is a or c or g or t.
  misc_feature (960860)..(960861): n is a or c or g or t.
  misc_feature (960872)..(960873): n is a or c or g or t.
  misc_feature (960879)..(960879): n is a or c or g or t.
  misc_feature (960890)..(960890): n is a or c or g or t.
  misc_feature (1250239)..(1250239): n is a or c or g or t.
  misc_feature (1302432)..(1302434): n is a or c or g or t.
  misc_feature (1302471)..(1302471): n is a or c or g or t.
  misc_feature (1302488)..(1302488): n is a or c or g or t.
  misc_feature (1674836)..(1674836): n is a or c or g or t.
MKKIFVKPRELVVPGTLLAQGPFKNGRGTFREGNAIYSTVIGLVEIRGNVIRVIPLEGPYIPEVGDNVLGKIVDVKFSSWTVDIGAPYQASLRVQDAVEERIDLLKTDLRKIFDIGDIIYAKVKAFNEVNQIDLTTKGMPFKGGPLRGGQLVTITPSKVPRLIGKGGSMINMIKTLTGTRIIVGQNGWVWVSGKNDELERLAIEAILKVDRESHTQGLTDRVKEFLLSRLRELKEQGVIEEIPEVNGEEGGEDDGQA

SEQ ID NO: 1915 - protein, 96 aa, Thermococcus kodakaraensis KOD1
  misc_feature (321437)..(321437): n is a or c or g or t.
  misc_feature (52783)..(527833): n is a or c or g or t.
  misc_feature (527901)..(527901): n is a or c or g or t.
  misc_feature (527978)..(527978): n is a or c or g or t.
  misc_feature (960838)..(960839): n is a or c or g or t.
  misc_feature (960860)..(960861): n is a or c or g or t.
  misc_feature (960872)..(960873): n is a or c or g or t.
  misc_feature (960879)..(960879): n is a or c or g or t.
  misc_feature (960890)..(960890): n is a or c or g or t.
  misc_feature (1250239)..(1250239): n is a or c or g or t.
  misc_feature (1302432)..(1302434): n is a or c or g or t.
  misc_feature (1302471)..(1302471): n is a or c or g or t.
  misc_feature (1302488)..(1302488): n is a or c or g or t.
  misc_feature (1674836)..(1674836): n is a or c or g or t.
VVAMDVIMALAAVVFIGFAVRTLYLLLREERKKDLLLTTAMWGLALVVWGLYLITVRGKTPVRFVVVVFGLTAFVLSFIGLFRLLEESPSEFGKEL

SEQ ID NO: 1916 - protein, 137 aa, Thermococcus kodakaraensis KOD1
  misc_feature (321437)..(321437): n is a or c or g or t.
  misc_feature (52783)..(527833): n is a or c or g or t.
  misc_feature (527901)..(527901): n is a or c or g or t.
  misc_feature (527978)..(527978): n is a or c or g or t.
  misc_feature (960838)..(960839): n is a or c or g or t.
  misc_feature (960860)..(960861): n is a or c or g or t.
  misc_feature (960872)..(960873): n is a or c or g or t.
  misc_feature (960879)..(960879): n is a or c or g or t.
  misc_feature (960890)..(960890): n is a or c or g or t.
  misc_feature (1250239)..(1250239): n is a or c or g or t.
  misc_feature (1302432)..(1302434): n is a or c or g or t.
  misc_feature (1302471)..(1302471): n is a or c or g or t.
  misc_feature (1302488)..(1302488): n is a or c or g or t.
  misc_feature (1674836)..(1674836): n is a or c or g or t.
MGLFDSLKKKDIKPTVKPPSIKKEVKGERAPAPTRTEVEVIPVEEDVLAKELVKPQLRYLHKITVTSYSDLEKVSRELQNGNIVLVDLTPLEKRPDVLEKVVQQLKGMVSALDGQAAKVCKHEIKLILLPNDIRIAK

SEQ ID NO: 1917 - protein, 284 aa, Thermococcus kodakaraensis KOD1
  misc_feature (321437)..(321437): n is a or c or g or t.
  misc_feature (52783)..(527833): n is a or c or g or t.
  misc_feature (527901)..(527901): n is a or c or g or t.
  misc_feature (527978)..(527978): n is a or c or g or t.
  misc_feature (960838)..(960839): n is a or c or g or t.
  misc_feature (960860)..(960861): n is a or c or g or t.
  misc_feature (960872)..(960873): n is a or c or g or t.
  misc_feature (960879)..(960879): n is a or c or g or t.
  misc_feature (960890)..(960890): n is a or c or g or t.
  misc_feature (1250239)..(1250239): n is a or c or g or t.
  misc_feature (1302432)..(1302434): n is a or c or g or t.
  misc_feature (1302471)..(1302471): n is a or c or g or t.
  misc_feature (1302488)..(1302488): n is a or c or g or t.
  misc_feature (1674836)..(1674836): n is a or c or g or t.
VKMEDILLPKERRDAVVLIGVDERDSVEFVRIYAVSEERAKRVLEEFFNAKGLFPTDYRLVSRGTEPVGDRKAITTRSETALSSALARLGLRLLSNGILYLDGVETLYQITLVSESLYSSIAGKEVEKPPQKEETGSLPEPEEVLSLGVDTLVENLSGRDISEFLPENALLLREPPVEKVAELLAEERDYPVVVETKDARRYSFLDFAVVVRLPPLTVEEFSAELSSRLGIDVDPSFFSSYPPEKLNMQNVRALVRLVEAIVEKWKVEREEALKLAVRLNLEGL

SEQ ID NO: 1918 - protein, 146 aa, Thermococcus kodakaraensis KOD1
  misc_feature (321437)..(321437): n is a or c or g or t.
  misc_feature (52783)..(527833): n is a or c or g or t.
  misc_feature (527901)..(527901): n is a or c or g or t.
  misc_feature (527978)..(527978): n is a or c or g or t.
  misc_feature (960838)..(960839): n is a or c or g or t.
  misc_feature (960860)..(960861): n is a or c or g or t.
  misc_feature (960872)..(960873): n is a or c or g or t.
  misc_feature (960879)..(960879): n is a or c or g or t.
  misc_feature (960890)..(960890): n is a or c or g or t.
  misc_feature (1250239)..(1250239): n is a or c or g or t.
  misc_feature (1302432)..(1302434): n is a or c or g or t.
  misc_feature (1302471)..(1302471): n is a or c or g or t.
  misc_feature (1302488)..(1302488): n is a or c or g or t.
  misc_feature (1674836)..(1674836): n is a or c or g or t.
VRAMTEIETIGFHYVVEAAGCDPEVLGNADRIRQIFLEAAKVGNMEVKASYFFKFSPTGVSGVVIVAESHISVHTWPEKGYAALDVYTCGTKANPEKAVDYILEQFKAKYAHVSEIKRGIEEDDETFTHMIMTWEEALRKNGNGSG

SEQ ID NO: 1919 - protein, 311 aa, Thermococcus kodakaraensis KOD1
  misc_feature (321437)..(321437): n is a or c or g or t.
  misc_feature (52783)..(527833): n is a or c or g or t.
  misc_feature (527901)..(527901): n is a or c or g or t.
  misc_feature (527978)..(527978): n is a or c or g or t.
  misc_feature (960838)..(960839): n is a or c or g or t.
  misc_feature (960860)..(960861): n is a or c or g or t.
  misc_feature (960872)..(960873): n is a or c or g or t.
  misc_feature (960879)..(960879): n is a or c or g or t.
  misc_feature (960890)..(960890): n is a or c or g or t.
  misc_feature (1250239)..(1250239): n is a or c or g or t.
  misc_feature (1302432)..(1302434): n is a or c or g or t.
  misc_feature (1302471)..(1302471): n is a or c or g or t.
  misc_feature (1302488)..(1302488): n is a or c or g or t.
  misc_feature (1674836)..(1674836): n is a or c or g or t.
MVDSMNMIEARGLTKVYGDTVAVDGLNLAVKKGTIFGFLGPNGAGKTTTILMFLGLIQPTKGEAYVNGINVQENPVEVKRISGYMPGEGSLYPNMSALDNLLYFAKFYRMPKSEAEKRARELLELVGLKDVADKKVGSFSTGMKQRLLLAQALINDPLVLFLDEPTNGLDPRGVVELRDVLRDLKKDGKTILFSSHILSEVEIISDEIGIISKGKLLISGSQDEIKRKFIEGRYMIVAETVEPIDVGSLDLDAADLRLEGQNRLVVYSERDIRVELLRMLESAGYTVLDVHLQEPTLEDVFMELVYGGKNL

SEQ ID NO: 1920 - protein, 187 aa, Thermococcus kodakaraensis KOD1
  misc_feature (321437)..(321437): n is a or c or g or t.
  misc_feature (52783)..(527833): n is a or c or g or t.
  misc_feature (527901)..(527901): n is a or c or g or t.
  misc_feature (527978)..(527978): n is a or c or g or t.
  misc_feature (960838)..(960839): n is a or c or g or t.
  misc_feature (960860)..(960861): n is a or c or g or t.
  misc_feature (960872)..(960873): n is a or c or g or t.
  misc_feature (960879)..(960879): n is a or c or g or t.
  misc_feature (960890)..(960890): n is a or c or g or t.
  misc_feature (1250239)..(1250239): n is a or c or g or t.
  misc_feature (1302432)..(1302434): n is a or c or g or t.
  misc_feature (1302471)..(1302471): n is a or c or g or t.
  misc_feature (1302488)..(1302488): n is a or c or g or t.
  misc_feature (1674836)..(1674836): n is a or c or g or t.
MKYGEVGKNWVWMLGLGLIFITLGVAGLMVLPLLSITSVTLFGAFMVVGGVLQMVQGITKAREWKSRTLHIVMGLIYVLGGIFAMINPVLATAIYTLILGLSLMFIGFLRIAVAFQNKDVSQWALMVLSGVLTVFLGLLIVLQWPWSSLWAVGLFISIDLIMAGANYIAIALAAKVEHEAEAKAAGG

SEQ ID NO: 1921 - protein, 154 aa, Thermococcus kodakaraensis KOD1
  misc_feature (321437)..(321437): n is a or c or g or t.
  misc_feature (52783)..(527833): n is a or c or g or t.
  misc_feature (527901)..(527901): n is a or c or g or t.
  misc_feature (527978)..(527978): n is a or c or g or t.
  misc_feature (960838)..(960839): n is a or c or g or t.
  misc_feature (960860)..(960861): n is a or c or g or t.
  misc_feature (960872)..(960873): n is a or c or g or t.
  misc_feature (960879)..(960879): n is a or c or g or t.
  misc_feature (960890)..(960890): n is a or c or g or t.
  misc_feature (1250239)..(1250239): n is a or c or g or t.
  misc_feature (1302432)..(1302434): n is a or c or g or t.
  misc_feature (1302471)..(1302471): n is a or c or g or t.
  misc_feature (1302488)..(1302488): n is a or c or g or t.
  misc_feature (1674836)..(1674836): n is a or c or g or t.
MNKALVIMAVITIALVVYAFETAQLPPASIEYTEVFYVDNQSVTFVTQDGFGLFTMKVSPHVDNFELKIEFPEGTTYLVRYGSEQFKGETTFKVKVHKGDAPQEVYVHFQLPEDLTKKVIYEGATPEIKITGDKLPFWHSEDVIYIKYRKEEKS

SEQ ID NO: 1922 - protein, 120 aa, Thermococcus kodakaraensis KOD1
  misc_feature (321437)..(321437): n is a or c or g or t.
  misc_feature (52783)..(527833): n is a or c or g or t.
  misc_feature (527901)..(527901): n is a or c or g or t.
  misc_feature (527978)..(527978): n is a or c or g or t.
  misc_feature (960838)..(960839): n is a or c or g or t.
  misc_feature (960860)..(960861): n is a or c or g or t.
  misc_feature (960872)..(960873): n is a or c or g or t.
  misc_feature (960879)..(960879): n is a or c or g or t.
  misc_feature (960890)..(960890): n is a or c or g or t.
  misc_feature (1250239)..(1250239): n is a or c or g or t.
  misc_feature (1302432)..(1302434): n is a or c or g or t.
  misc_feature (1302471)..(1302471): n is a or c or g or t.
  misc_feature (1302488)..(1302488): n is a or c or g or t.
  misc_feature (1674836)..(1674836): n is a or c or g or t.
MMFSMLYDPDDWSDEANDLINALIRARRRGVEVHILLENSLDTNREAYNYLKSNGIDVSYDSPSTTLHAKIVVVDGRIVFLGSHNWSESALHWNHEVSVKIISKQLAEEVINYFWSVRGP

SEQ ID NO: 1923 - protein, 306 aa, Thermococcus kodakaraensis KOD1
  misc_feature (321437)..(321437): n is a or c or g or t.
  misc_feature (52783)..(527833): n is a or c or g or t.
  misc_feature (527901)..(527901): n is a or c or g or t.
  misc_feature (527978)..(527978): n is a or c or g or t.
  misc_feature (960838)..(960839): n is a or c or g or t.
  misc_feature (960860)..(960861): n is a or c or g or t.
  misc_feature (960872)..(960873): n is a or c or g or t.
  misc_feature (960879)..(960879): n is a or c or g or t.
  misc_feature (960890)..(960890): n is a or c or g or t.
  misc_feature (1250239)..(1250239): n is a or c or g or t.
  misc_feature (1302432)..(1302434): n is a or c or g or t.
  misc_feature (1302471)..(1302471): n is a or c or g or t.
  misc_feature (1302488)..(1302488): n is a or c or g or t.
  misc_feature (1674836)..(1674836): n is a or c or g or t.
MPMKCKFCERPAFIKLHYPKMYLCEEHFTEYFERKVKRTIERYKMLKPDEKVLVVVSGGKDSAVTAHVLKKLGYNIECLHINLGIGEYSEKGERYAREQCEKIGAPLHIVRLKELLGYGIGEVRTRRPTCSYCGLTKRYIFNKFAYDNGFDAVATGHNLDDEASFIFNNIMNWNTQYLAKQGPVTPSQFNGKLVKKVKPLYEVTEREVVAYALANGIEYEIDECPYARGATTLEWKAILNEMEEKRPGTKINFVKGYLRKKHLFEAELKETELRECKVCGMPSSGEVCSFCRFWRLEKPIDFRVEK

SEQ ID NO: 1924 - protein, 330 aa, Thermococcus kodakaraensis KOD1
  misc_feature (321437)..(321437): n is a or c or g or t.
  misc_feature (52783)..(527833): n is a or c or g or t.
  misc_feature (527901)..(527901): n is a or c or g or t.
  misc_feature (527978)..(527978): n is a or c or g or t.
  misc_feature (960838)..(960839): n is a or c or g or t.
  misc_feature (960860)..(960861): n is a or c or g or t.
  misc_feature (960872)..(960873): n is a or c or g or t.
  misc_feature (960879)..(960879): n is a or c or g or t.
  misc_feature (960890)..(960890): n is a or c or g or t.
  misc_feature (1250239)..(1250239): n is a or c or g or t.
  misc_feature (1302432)..(1302434): n is a or c or g or t.
  misc_feature (1302471)..(1302471): n is a or c or g or t.
  misc_feature (1302488)..(1302488): n is a or c or g or t.
  misc_feature (1674836)..(1674836): n is a or c or g or t.
MWYALSTGNDASLYLKIYAAKFLMASINVTVKDYSRIERIGNYWIYTSNVSFVEPVGAVLLGNFYDLPVDYAYFEDPSNLAAIPPGSVGVVYAGNPSKEEEGLLWNFVRNGGTVVWVPEGSGCLFGVCGVMERIDNSRLSSDVFNVSIFAPFEYEGMPWYGPVFENVTPLLSVGDKAIIGLVKLGNGTLYLVGGNLLYHSLYWNSKKEAELIFGLAGIDGSLNYTLFSRSDGEYSLGLSPSRPMLVRISESYYPHWKIRVNGKLVEPIRDDRTGLTLITVSGKSTVDAEFRDPFMRLRAYSAIGWVVVLAYLLVEFFWRRRLKVVINESS

SEQ ID NO: 1925 - protein, 277 aa, Thermococcus kodakaraensis KOD1
  misc_feature (321437)..(321437): n is a or c or g or t.
  misc_feature (52783)..(527833): n is a or c or g or t.
  misc_feature (527901)..(527901): n is a or c or g or t.
  misc_feature (527978)..(527978): n is a or c or g or t.
  misc_feature (960838)..(960839): n is a or c or g or t.
  misc_feature (960860)..(960861): n is a or c or g or t.
  misc_feature (960872)..(960873): n is a or c or g or t.
  misc_feature (960879)..(960879): n is a or c or g or t.
  misc_feature (960890)..(960890): n is a or c or g or t.
  misc_feature (1250239)..(1250239): n is a or c or g or t.
  misc_feature (1302432)..(1302434): n is a or c or g or t.
  misc_feature (1302471)..(1302471): n is a or c or g or t.
  misc_feature (1302488)..(1302488): n is a or c or g or t.
  misc_feature (1674836)..(1674836): n is a or c or g or t.
VVLKCSICIHDERTATIDIINGNPICRECQVYLKHPFDREKIRRELDELMEKVDRAIVAYSGGKDSVVALYLAKEVYKVPELEAVMVDHGLMAEEAIENARRMAEALGVLFKILRYDYSDIFREALLKAQSPCRACSRRTMERLRKYALKNGYRYIITGHELPFGHKPYRLMSGGVIQIRLLSLMTERERFEILEKLPFEFPELPGYTTNCLVLGPALERYYKVHGHSFEHRRIAALVRYGLMDRERAEKLTAPPEVPERQWEIVLKKLNLEGKIER

SEQ ID NO: 1926 - protein, 394 aa, Thermococcus kodakaraensis KOD1
  misc_feature (321437)..(321437): n is a or c or g or t.
  misc_feature (52783)..(527833): n is a or c or g or t.
  misc_feature (527901)..(527901): n is a or c or g or t.
  misc_feature (527978)..(527978): n is a or c or g or t.
  misc_feature (960838)..(960839): n is a or c or g or t.
  misc_feature (960860)..(960861): n is a or c or g or t.
  misc_feature (960872)..(960873): n is a or c or g or t.
  misc_feature (960879)..(960879): n is a or c or g or t.
  misc_feature (960890)..(960890): n is a or c or g or t.
  misc_feature (1250239)..(1250239): n is a or c or g or t.
  misc_feature (1302432)..(1302434): n is a or c or g or t.
  misc_feature (1302471)..(1302471): n is a or c or g or t.
  misc_feature (1302488)..(1302488): n is a or c or g or t.
  misc_feature (1674836)..(1674836): n is a or c or g or t.
MIINDAAILTGGERMVSSYFRNLLLKLGLPEERLEVLEGKGALAEDEFEGIRYVRFRDSARNFRRGTVVFETGEAVLGFPHIKRVVQLENGIRRVFKNKPFYVEEKVDGYNVRVVKVKDKILAITRGGFVCPFTTERIEDFVNFDFFKDYPNLVLVGEMAGPESPYLVEGPPYVKEDIEFFLFDIQEKGTGRSLPAEERYRLAEEYGIPQVERFGLYDSSKVGELKELIEWLSEEKREGIVMKSPDMRRIAKYVTPYANINDIKIGSHIFFDLPHGYFMGRIKRLAFYLAENHVRGEEFENYAKALGTALLRPFVESIHEVANGGEVDETFTVRVKNITTAHKMVTHFERLGVKIHIEDIEDLGNGYWRITFKRVYPDATREIRELWNGLAFVD

SEQ ID NO: 1927 - protein, 458 aa, Thermococcus kodakaraensis KOD1
  misc_feature (321437)..(321437): n is a or c or g or t.
  misc_feature (52783)..(527833): n is a or c or g or t.
  misc_feature (527901)..(527901): n is a or c or g or t.
  misc_feature (527978)..(527978): n is a or c or g or t.
  misc_feature (960838)..(960839): n is a or c or g or t.
  misc_feature (960860)..(960861): n is a or c or g or t.
  misc_feature (960872)..(960873): n is a or c or g or t.
  misc_feature (960879)..(960879): n is a or c or g or t.
  misc_feature (960890)..(960890): n is a or c or g or t.
  misc_feature (1250239)..(1250239): n is a or c or g or t.
  misc_feature (1302432)..(1302434): n is a or c or g or t.
  misc_feature (1302471)..(1302471): n is a or c or g or t.
  misc_feature (1302488)..(1302488): n is a or c or g or t.
  misc_feature (1674836)..(1674836): n is a or c or g or t.
MIRKFVNRKRELEVLEELYNRGANLIVVYGRRRVGKTTLLRKFLEGKRGIYFLCSQRGYEKDLERFSEEVSEFIGMPVRFGSFEDAFRFLTKQGKLVVVIDEFPYLIEAYRPIVSVFQEIVDLIIKDSQVTLILSGSSVGMMEREVLGYKAPLYGRARGIMKLKPFRFFDMVEWYGSDFERLVRLYGVTWGVPRYMELLKDGSDEEIIANFFEPTAFLFNEARLLLMEELRNPTTYAQIIEAIALGKTRLTEISQYAMMEAKDLPAYLRVLQNLGIVKREVPVTKRVSKRGIYTIEDEYFRFYYRFVSPHYEDIEGLNPEPAIEDFRKNFNTYLGTTFEKVAREFLIMLSAKGHLPSLYHRFGRWWHKGEEIDLVALNEREKKALFVEVKWKELKEREARGVLKDLERKAELTGLDGWEKSYGLVAKSVEGKEELRDDGWLVWDLGDFERLISSKTQV

SEQ ID NO: 1928 - protein, 284 aa, Thermococcus kodakaraensis KOD1
  misc_feature (321437)..(321437): n is a or c or g or t.
  misc_feature (52783)..(527833): n is a or c or g or t.
  misc_feature (527901)..(527901): n is a or c or g or t.
  misc_feature (527978)..(527978): n is a or c or g or t.
  misc_feature (960838)..(960839): n is a or c or g or t.
  misc_feature (960860)..(960861): n is a or c or g or t.
  misc_feature (960872)..(960873): n is a or c or g or t.
  misc_feature (960879)..(960879): n is a or c or g or t.
  misc_feature (960890)..(960890): n is a or c or g or t.
  misc_feature (1250239)..(1250239): n is a or c or g or t.
  misc_feature (1302432)..(1302434): n is a or c or g or t.
  misc_feature (1302471)..(1302471): n is a or c or g or t.
  misc_feature (1302488)..(1302488): n is a or c or g or t.
  misc_feature (1674836)..(1674836): n is a or c or g or t.
VERFESLLNSLHRPQFSIGATTSKDDGKMAWHVFIPDSLLEETDDPKIRTYKVGQVARACSIFGVEHIWIYRAGGRDGKFIKTVLEYAETPQYLRKRLFPLMPELKYVGVIPPLRTPHHKLKGRPRVGEIREGFAFRRGKRTYADIGLDELAVVEGNVEGRATFKIVSTRPLRVVPTKPEDYWGYRVHLTRKSLAKTLKKAGLDLVIATSRKGRDIREVEIPPLEGEVGFVFGSPRKGVMELLGEEKFEFHLILNTIPNQRTETVRTEEALLATLAIFNLIRRD

SEQ ID NO: 1929 - protein, 242 aa, Thermococcus kodakaraensis KOD1
  misc_feature (321437)..(321437): n is a or c or g or t.
  misc_feature (52783)..(527833): n is a or c or g or t.
  misc_feature (527901)..(527901): n is a or c or g or t.
  misc_feature (527978)..(527978): n is a or c or g or t.
  misc_feature (960838)..(960839): n is a or c or g or t.
  misc_feature (960860)..(960861): n is a or c or g or t.
  misc_feature (960872)..(960873): n is a or c or g or t.
  misc_feature (960879)..(960879): n is a or c or g or t.
  misc_feature (960890)..(960890): n is a or c or g or t.
  misc_feature (1250239)..(1250239): n is a or c or g or t.
  misc_feature (1302432)..(1302434): n is a or c or g or t.
  misc_feature (1302471)..(1302471): n is a or c or g or t.
  misc_feature (1302488)..(1302488): n is a or c or g or t.
  misc_feature (1674836)..(1674836): n is a or c or g or t.
VSEMGKSLIQQRRGKGTTTFRAPSHRYRGAVRYVPLNLVQERTLRGVVEEILHDPGRTAPVARVKFEDGTKKLIIAPEGVLVGQEIYIGPEAPIAIGNTLPLAKIPEGTYVYDIEGVPGDGGKYVRAGGTYALVVSREKDKVIVQLPSGELKAFNPMCRATIGVVAGGGRLEKPIVKAGKAYYIAKARNRFWPKPRGVKMNAVNHPHGGKEHHIGRPSTVSRRAPPGRKVGHIAARRTGRRK

SEQ ID NO: 1930 - protein, 156 aa, Thermococcus kodakaraensis KOD1
  misc_feature (321437)..(321437): n is a or c or g or t.
  misc_feature (52783)..(527833): n is a or c or g or t.
  misc_feature (527901)..(527901): n is a or c or g or t.
  misc_feature (527978)..(527978): n is a or c or g or t.
  misc_feature (960838)..(960839): n is a or c or g or t.
  misc_feature (960860)..(960861): n is a or c or g or t.
  misc_feature (960872)..(960873): n is a or c or g or t.
  misc_feature (960879)..(960879): n is a or c or g or t.
  misc_feature (960890)..(960890): n is a or c or g or t.
  misc_feature (1250239)..(1250239): n is a or c or g or t.
  misc_feature (1302432)..(1302434): n is a or c or g or t.
  misc_feature (1302471)..(1302471): n is a or c or g or t.
  misc_feature (1302488)..(1302488): n is a or c or g or t.
  misc_feature (1674836)..(1674836): n is a or c or g or t.
MSRGRFSYSFQNFDPERMARASGRDLRISPKHSVELLREIRGMMLNDALRYLDDVIAKKRPVPMKRFNDSQGHKPGKGFGPGRYPVKVAKAVKKILLNAKNNAEQKGLDVDRLKIIHAAAHRGPVLRGYIPRAFGRATPFNEQTTHIEIVVEEIRR

SEQ ID NO: 1931 - protein, 66 aa, Thermococcus kodakaraensis KOD1
  misc_feature (321437)..(321437): n is a or c or g or t.
  misc_feature (52783)..(527833): n is a or c or g or t.
  misc_feature (527901)..(527901): n is a or c or g or t.
  misc_feature (527978)..(527978): n is a or c or g or t.
  misc_feature (960838)..(960839): n is a or c or g or t.
  misc_feature (960860)..(960861): n is a or c or g or t.
  misc_feature (960872)..(960873): n is a or c or g or t.
  misc_feature (960879)..(960879): n is a or c or g or t.
  misc_feature (960890)..(960890): n is a or c or g or t.
  misc_feature (1250239)..(1250239): n is a or c or g or t.
  misc_feature (1302432)..(1302434): n is a or c or g or t.
  misc_feature (1302471)..(1302471): n is a or c or g or t.
  misc_feature (1302488)..(1302488): n is a or c or g or t.
  misc_feature (1674836)..(1674836): n is a or c or g or t.
MKPSEIREMSIEEIDKKIRELRLELAKERGVLTMGASMENPMVIRNLRRDIARLLTIKREKLREKR

SEQ ID NO: 1932 - protein, 98 aa, Thermococcus kodakaraensis KOD1
  misc_feature (321437)..(321437): n is a or c or g or t.
  misc_feature (52783)..(527833): n is a or c or g or t.
  misc_feature (527901)..(527901): n is a or c or g or t.
  misc_feature (527978)..(527978): n is a or c or g or t.
  misc_feature (960838)..(960839): n is a or c or g or t.
  misc_feature (960860)..(960861): n is a or c or g or t.
  misc_feature (960872)..(960873): n is a or c or g or t.
  misc_feature (960879)..(960879): n is a or c or g or t.
  misc_feature (960890)..(960890): n is a or c or g or t.
  misc_feature (1250239)..(1250239): n is a or c or g or t.
  misc_feature (1302432)..(1302434): n is a or c or g or t.
  misc_feature (1302471)..(1302471): n is a or c or g or t.
  misc_feature (1302488)..(1302488): n is a or c or g or t.
  misc_feature (1674836)..(1674836): n is a or c or g or t.
VPRIVNPLDEMLFKEVLKEQQRIRVYVERARYGKLKTIIEGIDEKEFDLEDIAKKLKAKLACGGTAKNGRIELQGDHRDRVKKLLAELGFSEELIEVE

SEQ ID NO: 1933 - protein, 121 aa, Thermococcus kodakaraensis KOD1
  misc_feature (321437)..(321437): n is a or c or g or t.
  misc_feature (52783)..(527833): n is a or c or g or t.
  misc_feature (527901)..(527901): n is a or c or g or t.
  misc_feature (527978)..(527978): n is a or c or g or t.
  misc_feature (960838)..(960839): n is a or c or g or t.
  misc_feature (960860)..(960861): n is a or c or g or t.
  misc_feature (960872)..(960873): n is a or c or g or t.
  misc_feature (960879)..(960879): n is a or c or g or t.
  misc_feature (960890)..(960890): n is a or c or g or t.
  misc_feature (1250239)..(1250239): n is a or c or g or t.
  misc_feature (1302432)..(1302434): n is a or c or g or t.
  misc_feature (1302471)..(1302471): n is a or c or g or t.
  misc_feature (1302488)..(1302488): n is a or c or g or t.
  misc_feature (1674836)..(1674836): n is a or c or g or t.
MKLDMKQPRKQRKFLYNAPLHLRGKIMSAPLSKELREKYGVRNLPIRVGDKVKVMRGDFKGVEGKVVEVDLRRYRIHVEGVTHKKTDGTEVFYPLHPSNVMIVELNLEDEKREKIIERRAA

SEQ ID NO: 1934 - protein, 183 aa, Thermococcus kodakaraensis KOD1
  misc_feature (321437)..(321437): n is a or c or g or t.
  misc_feature (52783)..(527833): n is a or c or g or t.
  misc_feature (527901)..(527901): n is a or c or g or t.
  misc_feature (527978)..(527978): n is a or c or g or t.
  misc_feature (960838)..(960839): n is a or c or g or t.
  misc_feature (960860)..(960861): n is a or c or g or t.
  misc_feature (960872)..(960873): n is a or c or g or t.
  misc_feature (960879)..(960879): n is a or c or g or t.
  misc_feature (960890)..(960890): n is a or c or g or t.
  misc_feature (1250239)..(1250239): n is a or c or g or t.
  misc_feature (1302432)..(1302434): n is a or c or g or t.
  misc_feature (1302471)..(1302471): n is a or c or g or t.
  misc_feature (1302488)..(1302488): n is a or c or g or t.
  misc_feature (1674836)..(1674836): n is a or c or g or t.
MQINREAILADWEAHPMRKPRIAKVTINIGVGESGERLTKAETMLEQLVGQKPIRRRAKQTNRDFGIRRGEPIAVKVTLRGEKAYQMLDRLLEAVDRKLKASNFDEHGNFCFGIQEHINIPGVEYDPEIGIFGMDVCVTLERPGFRVAKRKRQRRKIPTKHKLTKEEGIVFAMEELKAKVEGL

SEQ ID NO: 1935 - protein, 130 aa, Thermococcus kodakaraensis KOD1
  misc_feature (321437)..(321437): n is a or c or g or t.
  misc_feature (52783)..(527833): n is a or c or g or t.
  misc_feature (527901)..(527901): n is a or c or g or t.
  misc_feature (527978)..(527978): n is a or c or g or t.
  misc_feature (960838)..(960839): n is a or c or g or t.
  misc_feature (960860)..(960861): n is a or c or g or t.
  misc_feature (960872)..(960873): n is a or c or g or t.
  misc_feature (960879)..(960879): n is a or c or g or t.
  misc_feature (960890)..(960890): n is a or c or g or t.
  misc_feature (1250239)..(1250239): n is a or c or g or t.
  misc_feature (1302432)..(1302434): n is a or c or g or t.
  misc_feature (1302471)..(1302471): n is a or c or g or t.
  misc_feature (1302488)..(1302488): n is a or c or g or t.
  misc_feature (1674836)..(1674836): n is a or c or g or t.
MTLLDPLANALSHITNSERVGKKEVYIKPASKLIGEVLRVMLENGYIGEFELIDDGRAGIYRVQLIGKINKAGAIKPRFPVKARDYEKWEKRFLPAFEFGILIVSTSQGVMTHKEALEKGIGGRLIAYVY

SEQ ID NO: 1936 - protein, 151 aa, Thermococcus kodakaraensis KOD1
  misc_feature (321437)..(321437): n is a or c or g or t.
  misc_feature (52783)..(527833): n is a or c or g or t.
  misc_feature (527901)..(527901): n is a or c or g or t.
  misc_feature (527978)..(527978): n is a or c or g or t.
  misc_feature (960838)..(960839): n is a or c or g or t.
  misc_feature (960860)..(960861): n is a or c or g or t.
  misc_feature (960872)..(960873): n is a or c or g or t.
  misc_feature (960879)..(960879): n is a or c or g or t.
  misc_feature (960890)..(960890): n is a or c or g or t.
  misc_feature (1250239)..(1250239): n is a or c or g or t.
  misc_feature (1302432)..(1302434): n is a or c or g or t.
  misc_feature (1302471)..(1302471): n is a or c or g or t.
  misc_feature (1302488)..(1302488): n is a or c or g or t.
  misc_feature (1674836)..(1674836): n is a or c or g or t.
VMIMLKTQRRIAAELLKCGENRIWIDPERIEDVAAAITREDIKRLIHDGVIKKKPIKGQSRARARAFQEARKKGRHRGPGSKKGKKTARMGKKEVWMMTIRALRKELRKLKAEGKLDAHTYRRLYIRAKGGQFKNKRQLYMFMQEHGILKE

SEQ ID NO: 1937 - protein, 235 aa, Thermococcus kodakaraensis KOD1
  misc_feature (321437)..(321437): n is a or c or g or t.
  misc_feature (52783)..(527833): n is a or c or g or t.
  misc_feature (527901)..(527901): n is a or c or g or t.
  misc_feature (527978)..(527978): n is a or c or g or t.
  misc_feature (960838)..(960839): n is a or c or g or t.
  misc_feature (960860)..(960861): n is a or c or g or t.
  misc_feature (960872)..(960873): n is a or c or g or t.
  misc_feature (960879)..(960879): n is a or c or g or t.
  misc_feature (960890)..(960890): n is a or c or g or t.
  misc_feature (1250239)..(1250239): n is a or c or g or t.
  misc_feature (1302432)..(1302434): n is a or c or g or t.
  misc_feature (1302471)..(1302471): n is a or c or g or t.
  misc_feature (1302488)..(1302488): n is a or c or g or t.
  misc_feature (1674836)..(1674836): n is a or c or g or t.
MSDPREIAQRVLEEWEPKTKLGRLVKEGQITDIHEIFRKGYQIKEPEIVDVLLPEVNLRENQEVLDIALTVRMTDSGRRIRFRVLAAVGNRDGYVGLGIGHGREVGIAIRKAINYAKMNIIEIKRGCGSWECRCRRPHSIPFAVEGKEGSVRVKLMPGPRGLGLVIGDVGKKILTLAGVQDVWSQTLGETRTTVNFAKAVFNALYNTNRVAIKPEDIERYGIVVGRAMPTTFEVE

SEQ ID NO: 1938 - protein, 199 aa, Thermococcus kodakaraensis KOD1
  misc_feature (321437)..(321437): n is a or c or g or t.
  misc_feature (52783)..(527833): n is a or c or g or t.
  misc_feature (527901)..(527901): n is a or c or g or t.
  misc_feature (527978)..(527978): n is a or c or g or t.
  misc_feature (960838)..(960839): n is a or c or g or t.
  misc_feature (960860)..(960861): n is a or c or g or t.
  misc_feature (960872)..(960873): n is a or c or g or t.
  misc_feature (960879)..(960879): n is a or c or g or t.
  misc_feature (960890)..(960890): n is a or c or g or t.
  misc_feature (1250239)..(1250239): n is a or c or g or t.
  misc_feature (1302432)..(1302434): n is a or c or g or t.
  misc_feature (1302471)..(1302471): n is a or c or g or t.
  misc_feature (1302488)..(1302488): n is a or c or g or t.
  misc_feature (1674836)..(1674836): n is a or c or g or t.
VRAMPFVVVITGIPGVGKSTITKLALKKTRAKFRLVNFGDLMFEEAVNMGLVKHRDEMRKLDPLTQKELQLKVAQRIVEIARKEPVLLDTHATIRTPAGYLLGFPREVIEILNPNFIVIIEAAPSEILGRRLRDLKRDRDVETEEQIARHQDLNRAAAIAYAMHSNALIKIIENHEDKGLEEAVNELVKVLDLAVSEYA

SEQ ID NO: 1939 - protein, 97 aa, Thermococcus kodakaraensis KOD1
  misc_feature (321437)..(321437): n is a or c or g or t.
  misc_feature (52783)..(527833): n is a or c or g or t.
  misc_feature (527901)..(527901): n is a or c or g or t.
  misc_feature (527978)..(527978): n is a or c or g or t.
  misc_feature (960838)..(960839): n is a or c or g or t.
  misc_feature (960860)..(960861): n is a or c or g or t.
  misc_feature (960872)..(960873): n is a or c or g or t.
  misc_feature (960879)..(960879): n is a or c or g or t.
  misc_feature (960890)..(960890): n is a or c or g or t.
  misc_feature (1250239)..(1250239): n is a or c or g or t.
  misc_feature (1302432)..(1302434): n is a or c or g or t.
  misc_feature (1302471)..(1302471): n is a or c or g or t.
  misc_feature (1302488)..(1302488): n is a or c or g or t.
  misc_feature (1674836)..(1674836): n is a or c or g or t.
MRLRGESMKPMYRSRSWRRKYVRTPGGRTVIHFERRKPKVAHCAMCGRPLNGVPRGRPSELRKLPKTKKRPERPYPNLCPSCMRKVMKAQVRASITA

SEQ ID NO: 1940 - protein, 76 aa, Thermococcus kodakaraensis KOD1
  misc_feature (321437)..(321437): n is a or c or g or t.
  misc_feature (52783)..(527833): n is a or c or g or t.
  misc_feature (527901)..(527901): n is a or c or g or t.
  misc_feature (527978)..(527978): n is a or c or g or t.
  misc_feature (960838)..(960839): n is a or c or g or t.
  misc_feature (960860)..(960861): n is a or c or g or t.
  misc_feature (960872)..(960873): n is a or c or g or t.
  misc_feature (960879)..(960879): n is a or c or g or t.
  misc_feature (960890)..(960890): n is a or c or g or t.
  misc_feature (1250239)..(1250239): n is a or c or g or t.
  misc_feature (1302432)..(1302434): n is a or c or g or t.
  misc_feature (1302471)..(1302471): n is a or c or g or t.
  misc_feature (1302488)..(1302488): n is a or c or g or t.
  misc_feature (1674836)..(1674836): n is a or c or g or t.
VGSMNLHAVIWEEEGVYVVKEVFTGVTTQGETIEEALENLREAVELYLEEFPELKEELGKIKFVGDFNVEIAKALG

SEQ ID NO: 1941 - protein, 180 aa, Thermococcus kodakaraensis KOD1
  misc_feature (321437)..(321437): n is a or c or g or t.
  misc_feature (52783)..(527833): n is a or c or g or t.
  misc_feature (527901)..(527901): n is a or c or g or t.
  misc_feature (527978)..(527978): n is a or c or g or t.
  misc_feature (960838)..(960839): n is a or c or g or t.
  misc_feature (960860)..(960861): n is a or c or g or t.
  misc_feature (960872)..(960873): n is a or c or g or t.
  misc_feature (960879)..(960879): n is a or c or g or t.
  misc_feature (960890)..(960890): n is a or c or g or t.
  misc_feature (1250239)..(1250239): n is a or c or g or t.
  misc_feature (1302432)..(1302434): n is a or c or g or t.
  misc_feature (1302471)..(1302471): n is a or c or g or t.
  misc_feature (1302488)..(1302488): n is a or c or g or t.
  misc_feature (1674836)..(1674836): n is a or c or g or t.
MGDPKRQRKKYETPSHPWIKERLDRERVLKRNYALKNKKELWRHETQLKEFRRRARRLLAARGKQAEIERQQLLQRLYRLGLLPADAVLDDVLSLTVEDVLERRLQTIVYRKGLARTMKQARQLIVHGHIEVNGQVIRSPGYLVLREEEDTITYAKGSPFAKEGHPERMVIEQAKQGGEA

SEQ ID NO: 1942 - protein, 143 aa, Thermococcus kodakaraensis KOD1
  misc_feature (321437)..(321437): n is a or c or g or t.
  misc_feature (52783)..(527833): n is a or c or g or t.
  misc_feature (527901)..(527901): n is a or c or g or t.
  misc_feature (527978)..(527978): n is a or c or g or t.
  misc_feature (960838)..(960839): n is a or c or g or t.
  misc_feature (960860)..(960861): n is a or c or g or t.
  misc_feature (960872)..(960873): n is a or c or g or t.
  misc_feature (960879)..(960879): n is a or c or g or t.
  misc_feature (960890)..(960890): n is a or c or g or t.
  misc_feature (1250239)..(1250239): n is a or c or g or t.
  misc_feature (1302432)..(1302434): n is a or c or g or t.
  misc_feature (1302471)..(1302471): n is a or c or g or t.
  misc_feature (1302488)..(1302488): n is a or c or g or t.
  misc_feature (1674836)..(1674836): n is a or c or g or t.
VESSEVRKMRVIQTAGKRKTAVARATIREGKGRVRINHKPVEIIEPEIARFTIMEPLILAGEEIVSRVDIDVKVEGGGFMGQAEAARVAIARALVEWTNDMNLKEKFMKYDRTMLVGDSRRTEPHKPNRSTKGPRAKRQKSYR

SEQ ID NO: 1943 - protein, 54 aa, Thermococcus kodakaraensis KOD1
  misc_feature (321437)..(321437): n is a or c or g or t.
  misc_feature (52783)..(527833): n is a or c or g or t.
  misc_feature (527901)..(527901): n is a or c or g or t.
  misc_feature (527978)..(527978): n is a or c or g or t.
  misc_feature (960838)..(960839): n is a or c or g or t.
  misc_feature (960860)..(960861): n is a or c or g or t.
  misc_feature (960872)..(960873): n is a or c or g or t.
  misc_feature (960879)..(960879): n is a or c or g or t.
  misc_feature (960890)..(960890): n is a or c or g or t.
  misc_feature (1250239)..(1250239): n is a or c or g or t.
  misc_feature (1302432)..(1302434): n is a or c or g or t.
  misc_feature (1302471)..(1302471): n is a or c or g or t.
  misc_feature (1302488)..(1302488): n is a or c or g or t.
  misc_feature (1674836)..(1674836): n is a or c or g or t.
VIRMARFPEAEARIFRKLVCMRCGATNPWGAKKCRKCGYKGLRPKAREPRGGGR

SEQ ID NO: 1944 - protein, 99 aa, Thermococcus kodakaraensis KOD1
  misc_feature (321437)..(321437): n is a or c or g or t.
  misc_feature (52783)..(527833): n is a or c or g or t.
  misc_feature (527901)..(527901): n is a or c or g or t.
  misc_feature (527978)..(527978): n is a or c or g or t.
  misc_feature (960838)..(960839): n is a or c or g or t.
  misc_feature (960860)..(960861): n is a or c or g or t.
  misc_feature (960872)..(960873): n is a or c or g or t.
  misc_feature (960879)..(960879): n is a or c or g or t.
  misc_feature (960890)..(960890): n is a or c or g or t.
  misc_feature (1250239)..(1250239): n is a or c or g or t.
  misc_feature (1302432)..(1302434): n is a or c or g or t.
  misc_feature (1302471)..(1302471): n is a or c or g or t.
  misc_feature (1302488)..(1302488): n is a or c or g or t.
  misc_feature (1674836)..(1674836): n is a or c or g or t.
MEFDMSGMFGDLGVGAIVGFVTGYALKKFVKIVMTLIGAYLLSLFWLQQKGVITINTDKLFNLSENVTQQVLGLGQKALGILPGTGAFVAGFYLGFKKG

SEQ ID NO: 1945 - protein, 72 aa, Thermococcus kodakaraensis KOD1
  misc_feature (321437)..(321437): n is a or c or g or t.
  misc_feature (52783)..(527833): n is a or c or g or t.
  misc_feature (527901)..(527901): n is a or c or g or t.
  misc_feature (527978)..(527978): n is a or c or g or t.
  misc_feature (960838)..(960839): n is a or c or g or t.
  misc_feature (960860)..(960861): n is a or c or g or t.
  misc_feature (960872)..(960873): n is a or c or g or t.
  misc_feature (960879)..(960879): n is a or c or g or t.
  misc_feature (960890)..(960890): n is a or c or g or t.
  misc_feature (1250239)..(1250239): n is a or c or g or t.
  misc_feature (1302432)..(1302434): n is a or c or g or t.
  misc_feature (1302471)..(1302471): n is a or c or g or t.
  misc_feature (1302488)..(1302488): n is a or c or g or t.
  misc_feature (1674836)..(1674836): n is a or c or g or t.
VIPMPTVIKRDPKRFLKELRIHYGDVWKMPSSQYLASPDFVVVDPKTGKKTKVSFVSLDDGEVVGVVYDDLS

SEQ ID NO: 1946 - protein, 450 aa, Thermococcus kodakaraensis KOD1
  misc_feature (321437)..(321437): n is a or c or g or t.
  misc_feature (52783)..(527833): n is a or c or g or t.
  misc_feature (527901)..(527901): n is a or c or g or t.
  misc_feature (527978)..(527978): n is a or c or g or t.
  misc_feature (960838)..(960839): n is a or c or g or t.
  misc_feature (960860)..(960861): n is a or c or g or t.
  misc_feature (960872)..(960873): n is a or c or g or t.
  misc_feature (960879)..(960879): n is a or c or g or t.
  misc_feature (960890)..(960890): n is a or c or g or t.
  misc_feature (1250239)..(1250239): n is a or c or g or t.
  misc_feature (1302432)..(1302434): n is a or c or g or t.
  misc_feature (1302471)..(1302471): n is a or c or g or t.
  misc_feature (1302488)..(1302488): n is a or c or g or t.
  misc_feature (1674836)..(1674836): n is a or c or g or t.
VRLMKYDVVVIGGSAGGLTAAISAKRFYPDKSVLVIKKEDVSMIPCGIPYIFGTLRSVEDDVLPTERFLKPLGIDVLVDEVTEINPKSKTLLTKSGREIGWEKLVLATGSRPQIPDIPGVELEGVYTVSKDYHYLKELKKRVEDAEKVVIIGGGFIALEVGDEIRKLGKDVTIVVRSRLLRNSFDPEFSEMIENRLKEVGINVVYGHVERLVGRERVEGVKLVEGGEIPADLVILSTGYRPNVELAVKTGLKVTRYGIWTDEYMRTSCPDIFAVGDCVEHRDFFTGKPFPLMLASTATFEARIAGANLFKLQIVRENRRTIGAYSTHVAGLTLAAAGLTEEAAKREGFEVIVGRATGPDRHPAKFEDTSMVTVKLIFSRDRGAILGAQLAGGKSVGEMINVLALAIQKRLTASELYTLQIATHPLLTASPVGYQILQAAEDALAKLRAGA

SEQ ID NO: 1947 - protein, 337 aa, Thermococcus kodakaraensis KOD1
  misc_feature (321437)..(321437): n is a or c or g or t.
  misc_feature (52783)..(527833): n is a or c or g or t.
  misc_feature (527901)..(527901): n is a or c or g or t.
  misc_feature (527978)..(527978): n is a or c or g or t.
  misc_feature (960838)..(960839): n is a or c or g or t.
  misc_feature (960860)..(960861): n is a or c or g or t.
  misc_feature (960872)..(960873): n is a or c or g or t.
  misc_feature (960879)..(960879): n is a or c or g or t.
  misc_feature (960890)..(960890): n is a or c or g or t.
  misc_feature (1250239)..(1250239): n is a or c or g or t.
  misc_feature (1302432)..(1302434): n is a or c or g or t.
  misc_feature (1302471)..(1302471): n is a or c or g or t.
  misc_feature (1302488)..(1302488): n is a or c or g or t.
  misc_feature (1674836)..(1674836): n is a or c or g or t.
MSVKRVLASAPAKIILFGEHSVVYGKPAIAAAIDLRTYVSAEFNDTGAIKIEAHDIRTPGLIVSFTEDSIYFESDYGKAAEVLGYVRQAIELVREEADVNGKGITVSITSQIPVGAGLGSSAAVAVATIGAVSRLLGLELSNEEVGKLGHKVELLVQGASSGIDPTVSAIGGFIHYQKGKFEHLPFMELPLVVGYTGSSGSTKELVAMVRKNYEEMPEIFEPILNSMGRLVEKAREVITSDLDRELKFQTLGKLMNINHGLLDALGVSTKKLSELVYAARTAGALGAKITGAGGGGCMYALAPGKQSEVATAITIAGGTPMITKISREGMRIEEVEE

SEQ ID NO: 1948 - protein, 391 aa, Thermococcus kodakaraensis KOD1
  misc_feature (321437)..(321437): n is a or c or g or t.
  misc_feature (52783)..(527833): n is a or c or g or t.
  misc_feature (527901)..(527901): n is a or c or g or t.
  misc_feature (527978)..(527978): n is a or c or g or t.
  misc_feature (960838)..(960839): n is a or c or g or t.
  misc_feature (960860)..(960861): n is a or c or g or t.
  misc_feature (960872)..(960873): n is a or c or g or t.
  misc_feature (960879)..(960879): n is a or c or g or t.
  misc_feature (960890)..(960890): n is a or c or g or t.
  misc_feature (1250239)..(1250239): n is a or c or g or t.
  misc_feature (1302432)..(1302434): n is a or c or g or t.
  misc_feature (1302471)..(1302471): n is a or c or g or t.
  misc_feature (1302488)..(1302488): n is a or c or g or t.
  misc_feature (1674836)..(1674836): n is a or c or g or t.
VSGNFFNFFSSIPSVVVMGEFDREELTIIRKFEHIEHCLKRNVQAHVTNGFEDVHFVHMSLPEIDKDEIDLSVEFLGRKFDYPIFIAGMTGGTKGSQLAGRINKTLAKAAQELNIPMGVGSQRAMIRKPETWESYYVRDVAPDVFLVGNLGAPQFSETIRERYGLEEALKAVETIQADALAIHMNPLQESVQPEGDTQYRGVLKALAELKAEFPYPIIAKETGAGVSMEVAVRLESIGIDAIDVGGLGGTSWSGVEYYRAKDEIGKDLALRFWDWGIKTAISVAEVRYATELPIIATGGMRDGIAMAKALAMGATFAGVALPLLKPAVKGDVEGVIKILRRYIEEIRNAMFLVGARNVEELRKVPLVITGFTREWLEQRIDLPSYLRNRGI

SEQ ID NO: 1949 - protein, 209 aa, Thermococcus kodakaraensis KOD1
  misc_feature (321437)..(321437): n is a or c or g or t.
  misc_feature (52783)..(527833): n is a or c or g or t.
  misc_feature (527901)..(527901): n is a or c or g or t.
  misc_feature (527978)..(527978): n is a or c or g or t.
  misc_feature (960838)..(960839): n is a or c or g or t.
  misc_feature (960860)..(960861): n is a or c or g or t.
  misc_feature (960872)..(960873): n is a or c or g or t.
  misc_feature (960879)..(960879): n is a or c or g or t.
  misc_feature (960890)..(960890): n is a or c or g or t.
  misc_feature (1250239)..(1250239): n is a or c or g or t.
  misc_feature (1302432)..(1302434): n is a or c or g or t.
  misc_feature (1302471)..(1302471): n is a or c or g or t.
  misc_feature (1302488)..(1302488): n is a or c or g or t.
  misc_feature (1674836)..(1674836): n is a or c or g or t.
MFPEGRTTNREEVNEMGMYKYIREAWKSPKKSYVGELLKKRMIQWRRDPVVKRIERPTRLDRARSLGYQAKQGYVVVRVRVRRGGRKRPRWKGGRKPSKMGMVKYSPKKSLQWIAEEKAARKFPNLEVLNSYWVGEDGMYKWFEVIMVDPHHPVIKSDPKIAWIAGKAHKGRVFRGLTSAGKRSRGLLNKGKGAEKVRPSIRAHQGKGK

SEQ ID NO: 1950 - protein, 524 aa, Thermococcus kodakaraensis KOD1
  misc_feature (321437)..(321437): n is a or c or g or t.
  misc_feature (52783)..(527833): n is a or c or g or t.
  misc_feature (527901)..(527901): n is a or c or g or t.
  misc_feature (527978)..(527978): n is a or c or g or t.
  misc_feature (960838)..(960839): n is a or c or g or t.
  misc_feature (960860)..(960861): n is a or c or g or t.
  misc_feature (960872)..(960873): n is a or c or g or t.
  misc_feature (960879)..(960879): n is a or c or g or t.
  misc_feature (960890)..(960890): n is a or c or g or t.
  misc_feature (1250239)..(1250239): n is a or c or g or t.
  misc_feature (1302432)..(1302434): n is a or c or g or t.
  misc_feature (1302471)..(1302471): n is a or c or g or t.
  misc_feature (1302488)..(1302488): n is a or c or g or t.
  misc_feature (1674836)..(1674836): n is a or c or g or t.
VMGVLRYSFSKYWELSRTLRKRQALIVLLNLIVSYLNVRFALMLRDTINSPNTSRILILGGFLVLINALSFVVTYLLDVSKRAMQVEIIGRIYEKILHAKEETFRVKTPGEYLTDLVSNVVYVSSLSAALIPALVVNAVSFGAYLIALFLLSPRLSLVLLPFLIATVLLFKKQVGELAKVSSKERDRFSMLIERIRTNLEGRKSIKNTDSLRGAMRKLNDECTGWYNSVKGLVLASLKYRYLYHTLYRLVPLISVLVGLLWRMDTGTLVAFYMMAGEIIEPLVVILNDLGHVPESYPALKRIDEALNMEEENFGERTLTRVEGIELRNVSYGTILKNVNLKISRGESVGIVGESGSGKTTLANVIACHYRPEEGKVLVNDIPAKEFGNLRRKIILVETNEFIFPGTVRENVTLWEEFDEEELREAVSIAKVNLPLDEKIGPSYREVSLGERQRIALARALIRKPEVLILDEALSGVDPDVEAEIIGEIKARGITLVAISHRPSTTKLVDRLVLVEKGRVREVGG

SEQ ID NO: 1951 - protein, 224 aa, Thermococcus kodakaraensis KOD1
  misc_feature (321437)..(321437): n is a or c or g or t.
  misc_feature (52783)..(527833): n is a or c or g or t.
  misc_feature (527901)..(527901): n is a or c or g or t.
  misc_feature (527978)..(527978): n is a or c or g or t.
  misc_feature (960838)..(960839): n is a or c or g or t.
  misc_feature (960860)..(960861): n is a or c or g or t.
  misc_feature (960872)..(960873): n is a or c or g or t.
  misc_feature (960879)..(960879): n is a or c or g or t.
  misc_feature (960890)..(960890): n is a or c or g or t.
  misc_feature (1250239)..(1250239): n is a or c or g or t.
  misc_feature (1302432)..(1302434): n is a or c or g or t.
  misc_feature (1302471)..(1302471): n is a or c or g or t.
  misc_feature (1302488)..(1302488): n is a or c or g or t.
  misc_feature (1674836)..(1674836): n is a or c or g or t.
VAGGMSEEEVSFSRDYFVEMDVRDEEAHELASDWFDEVVFTKKLVLEDPPDWGSLKEELKELRGKYGKVALLLVTRKPSLIREVKSRNLKALLYVQGGDMRINRMAIESGVDALISPWFGRKDPGFDHTLAGMAARRGVAIGFSLSPLLNANPYGRAQILRFMMKTWQLVKKYRVPRFITSSAESRWEVRGPRDLMSLGINIGMEIPEARASLNFYPRTIVWKL

SEQ ID NO: 1952 - protein, 352 aa, Thermococcus kodakaraensis KOD1
  misc_feature (321437)..(321437): n is a or c or g or t.
  misc_feature (52783)..(527833): n is a or c or g or t.
  misc_feature (527901)..(527901): n is a or c or g or t.
  misc_feature (527978)..(527978): n is a or c or g or t.
  misc_feature (960838)..(960839): n is a or c or g or t.
  misc_feature (960860)..(960861): n is a or c or g or t.
  misc_feature (960872)..(960873): n is a or c or g or t.
  misc_feature (960879)..(960879): n is a or c or g or t.
  misc_feature (960890)..(960890): n is a or c or g or t.
  misc_feature (1250239)..(1250239): n is a or c or g or t.
  misc_feature (1302432)..(1302434): n is a or c or g or t.
  misc_feature (1302471)..(1302471): n is a or c or g or t.
  misc_feature (1302488)..(1302488): n is a or c or g or t.
  misc_feature (1674836)..(1674836): n is a or c or g or t.
VVDIQVTTCPKDLLNGPCGGALNERCEVDGKECPWVRILERFNVDPATLFEEHPLLLELEDLVERDSRPRDSAFWQNLERGRAFSVEFPVAAVSKPEESLQVLREIRANLVTVPDNPLGYPHYDPIAVACYLKSLGLRSGVMPHITAKDRNLNALTSELRTAQVFGCEAVLLTTGDWPGFAVPSRPVFDVDASNLIRLARLVFAGVMPTKEVLEVESRPRVASTMNPHYRPKLEARRLARKLIAGSEAFFTQVVAAGESATGISKIVEELKKYADVDVPIIASVLYPMKEEMKPFLRALGIPVGDEPFEALLEELKAVEAVRGLNLIVSSRSLEEWLGLWREAREIIKGVFE

SEQ ID NO: 1953 - protein, 339 aa, Thermococcus kodakaraensis KOD1
  misc_feature (321437)..(321437): n is a or c or g or t.
  misc_feature (52783)..(527833): n is a or c or g or t.
  misc_feature (527901)..(527901): n is a or c or g or t.
  misc_feature (527978)..(527978): n is a or c or g or t.
  misc_feature (960838)..(960839): n is a or c or g or t.
  misc_feature (960860)..(960861): n is a or c or g or t.
  misc_feature (960872)..(960873): n is a or c or g or t.
  misc_feature (960879)..(960879): n is a or c or g or t.
  misc_feature (960890)..(960890): n is a or c or g or t.
  misc_feature (1250239)..(1250239): n is a or c or g or t.
  misc_feature (1302432)..(1302434): n is a or c or g or t.
  misc_feature (1302471)..(1302471): n is a or c or g or t.
  misc_feature (1302488)..(1302488): n is a or c or g or t.
  misc_feature (1674836)..(1674836): n is a or c or g or t.
VSEMELPILPTSIIGSYPKPRWLLRMYNLRELGRLPEEDFREAVRDASVAVLREHERAGIDIPWDGEMGRSEMTEYFTAKIAGFKFYGPIRVWGNAYFNKAAAVSKLEYREPLVLDEFRWVKENTTREIIKVPITGPYTIAEWSFNEYYSSKEELAFDLAKILNKEFKLLEKEGATFIQIDEPAMLNHPDEVSIAVEAINRAVKGVKVKFGLHVCYSNYYLLADYFDDIKVSQFALEAANRNFRDLDYLKKLTHQELGFGVVDVHNPRVESPEEVAKAIRKVMEYIEPERLYINPDCGLKLLDRRIAYQKLVNMVKGVEIVRRELAREGKTSIPFRREV

SEQ ID NO: 1954 - protein, 295 aa, Thermococcus kodakaraensis KOD1
  misc_feature (321437)..(321437): n is a or c or g or t.
  misc_feature (52783)..(527833): n is a or c or g or t.
  misc_feature (527901)..(527901): n is a or c or g or t.
  misc_feature (527978)..(527978): n is a or c or g or t.
  misc_feature (960838)..(960839): n is a or c or g or t.
  misc_feature (960860)..(960861): n is a or c or g or t.
  misc_feature (960872)..(960873): n is a or c or g or t.
  misc_feature (960879)..(960879): n is a or c or g or t.
  misc_feature (960890)..(960890): n is a or c or g or t.
  misc_feature (1250239)..(1250239): n is a or c or g or t.
  misc_feature (1302432)..(1302434): n is a or c or g or t.
  misc_feature (1302471)..(1302471): n is a or c or g or t.
  misc_feature (1302488)..(1302488): n is a or c or g or t.
  misc_feature (1674836)..(1674836): n is a or c or g or t.
VGDMRIRVPATIANFGPGFDVFGVGIGEPYDELKFVESDEWEIEVEGYDVPTDGRNVAVVAARALATLVGEELYLRMKLRKEIRPRSGLGSSGASSLAGALAAARVLGIEDDGLIIKAALAGEEAASGSAHGDNVVPAYYGDFTIIESLNPLRVHRIPVDFPLVVVLPQIEVPTREARRILPERVPMGDAVRNVALAGALVKALTSGDVQTVGRLLEDRIALPYRLRLMPWFARVWKAALDAGAYGAFVSGSGPAIFALGEDLHAIGKAIAEAFLEIGVDAEVYITRAGVGAFWL

SEQ ID NO: 1955 - protein, 138 aa, Thermococcus kodakaraensis KOD1
  misc_feature (321437)..(321437): n is a or c or g or t.
  misc_feature (52783)..(527833): n is a or c or g or t.
  misc_feature (527901)..(527901): n is a or c or g or t.
  misc_feature (527978)..(527978): n is a or c or g or t.
  misc_feature (960838)..(960839): n is a or c or g or t.
  misc_feature (960860)..(960861): n is a or c or g or t.
  misc_feature (960872)..(960873): n is a or c or g or t.
  misc_feature (960879)..(960879): n is a or c or g or t.
  misc_feature (960890)..(960890): n is a or c or g or t.
  misc_feature (1250239)..(1250239): n is a or c or g or t.
  misc_feature (1302432)..(1302434): n is a or c or g or t.
  misc_feature (1302471)..(1302471): n is a or c or g or t.
  misc_feature (1302488)..(1302488): n is a or c or g or t.
  misc_feature (1674836)..(1674836): n is a or c or g or t.
MKIIRFGVSVPEELLEKFDQIIAEKGYVNRSEAIRDLMRDFIVRHEWEAGDKEVAGTITMLYNHDEADVVKELLDLQHDYLNEIISSIHVHMDEHNCLEVVIVKGKAKRIKEIADRLLSLKGVKHGKLVMTGTGKELV

SEQ ID NO: 1956 - protein, 105 aa, Thermococcus kodakaraensis KOD1
  misc_feature (321437)..(321437): n is a or c or g or t.
  misc_feature (52783)..(527833): n is a or c or g or t.
  misc_feature (527901)..(527901): n is a or c or g or t.
  misc_feature (527978)..(527978): n is a or c or g or t.
  misc_feature (960838)..(960839): n is a or c or g or t.
  misc_feature (960860)..(960861): n is a or c or g or t.
  misc_feature (960872)..(960873): n is a or c or g or t.
  misc_feature (960879)..(960879): n is a or c or g or t.
  misc_feature (960890)..(960890): n is a or c or g or t.
  misc_feature (1250239)..(1250239): n is a or c or g or t.
  misc_feature (1302432)..(1302434): n is a or c or g or t.
  misc_feature (1302471)..(1302471): n is a or c or g or t.
  misc_feature (1302488)..(1302488): n is a or c or g or t.
  misc_feature (1674836)..(1674836): n is a or c or g or t.
MKKVEAVLRPEDFETVKKALKSAGYVSLTAYPVQGRGVQGGIPPYDLLPKMKIEIVVPDKDVDDVIGIIVRHARRGIPGDGKIFVLPVYDVVRIRTGERGEEALH

SEQ ID NO: 1957 - protein, 66 aa, Thermococcus kodakaraensis KOD1
  misc_feature (321437)..(321437): n is a or c or g or t.
  misc_feature (52783)..(527833): n is a or c or g or t.
  misc_feature (527901)..(527901): n is a or c or g or t.
  misc_feature (527978)..(527978): n is a or c or g or t.
  misc_feature (960838)..(960839): n is a or c or g or t.
  misc_feature (960860)..(960861): n is a or c or g or t.
  misc_feature (960872)..(960873): n is a or c or g or t.
  misc_feature (960879)..(960879): n is a or c or g or t.
  misc_feature (960890)..(960890): n is a or c or g or t.
  misc_feature (1250239)..(1250239): n is a or c or g or t.
  misc_feature (1302432)..(1302434): n is a or c or g or t.
  misc_feature (1302471)..(1302471): n is a or c or g or t.
  misc_feature (1302488)..(1302488): n is a or c or g or t.
  misc_feature (1674836)..(1674836): n is a or c or g or t.
MEFAFSVLEENYRDGIPLEEGVKLALRAIKAATKRDVFTGGGVTLVTITEEGYREWSEEELKSLLE

SEQ ID NO: 1958 - protein, 648 aa, Thermococcus kodakaraensis KOD1
  misc_feature (321437)..(321437): n is a or c or g or t.
  misc_feature (52783)..(527833): n is a or c or g or t.
  misc_feature (527901)..(527901): n is a or c or g or t.
  misc_feature (527978)..(527978): n is a or c or g or t.
  misc_feature (960838)..(960839): n is a or c or g or t.
  misc_feature (960860)..(960861): n is a or c or g or t.
  misc_feature (960872)..(960873): n is a or c or g or t.
  misc_feature (960879)..(960879): n is a or c or g or t.
  misc_feature (960890)..(960890): n is a or c or g or t.
  misc_feature (1250239)..(1250239): n is a or c or g or t.
  misc_feature (1302432)..(1302434): n is a or c or g or t.
  misc_feature (1302471)..(1302471): n is a or c or g or t.
  misc_feature (1302488)..(1302488): n is a or c or g or t.
  misc_feature (1674836)..(1674836): n is a or c or g or t.
MIRRETFVDDILKEIREIIVQMVPREAGITDVEFEGPELVIYVKNPEAMMKDGELIKNLAKVLKKRISVRPDPDILLPPEKAEELIKQLVPPEAEITNISFDPSVGEVLIEARKPGLVIGKNGETLRLITQKVHWAPRVVRTPPIQSQTIYSIRSILQTESKDRRKFLRQVGRNIYRKSEYKSRWIRITGLGGFREVGRSALLVQTDESYVLVDFGVNIAALKDPTKAYPHFDAPEFRYVLDEGLLDAIIITHAHLDHSGMLPYLFRYKLFDGPIYTTPPTRDLMTLLQQDFIEIQHMNGVEPLYRPKDIKEVIKHTITLDYGEVRDIAPDIRLTLHNAGHILGSSIVHLHIGNGLHNIAITGDFKFIPTRLFEPAVSRFPRLETLVMESTYGGSNDYQMPREEAEKRLIEVIHQTLKRGGKVLIPAMAVGRAQEIMMVLEEYARVGGIEVPIYLDGMIWEATAIHTAYPEYLSKHIREQIFHEGYNPFLNPIFKSVANSRERQDIIDSGEPAIIIATSGMLVGGPSVEYFKQLAPDPKNSIIFVSYQAEGTLGRQVQRGLREIPIVGEDGRTEVINVNMEVHTIDGFSGHADRRELMSYVARVRPRPERIITVHGEAHKCLDLSSSIHKKFGISTRAPNNLDAIRLK

SEQ ID NO: 1959 - protein, 446 aa, Thermococcus kodakaraensis KOD1
  misc_feature (321437)..(321437): n is a or c or g or t.
  misc_feature (52783)..(527833): n is a or c or g or t.
  misc_feature (527901)..(527901): n is a or c or g or t.
  misc_feature (527978)..(527978): n is a or c or g or t.
  misc_feature (960838)..(960839): n is a or c or g or t.
  misc_feature (960860)..(960861): n is a or c or g or t.
  misc_feature (960872)..(960873): n is a or c or g or t.
  misc_feature (960879)..(960879): n is a or c or g or t.
  misc_feature (960890)..(960890): n is a or c or g or t.
  misc_feature (1250239)..(1250239): n is a or c or g or t.
  misc_feature (1302432)..(1302434): n is a or c or g or t.
  misc_feature (1302471)..(1302471): n is a or c or g or t.
  misc_feature (1302488)..(1302488): n is a or c or g or t.
  misc_feature (1674836)..(1674836): n is a or c or g or t.
MASVGLSPKFFLTSGFTNMLVSRTNFMPTTTLFKVLSLKNLGDSMKVGLVFGVSELASPEAFREEAANFVRVLEQDFDVVGGEIIQSRSDFRKLKEKINFNDVDALVLFPLTGGTEGFLKEFSVFRRPTVFYGNPFNNSLAAAIELREYFRDRLIPSTVVKSSEELKAALLAYDDMKDVLDRFLRARIGLIGRVSPWLINEKLDIPYTHISLKKFYEYYEKTTAEEGWEAVKEIVENAEEIKEPDRESLAKAGRVYVAIKRILEDYHLKGFTVGCFDLIGKIGTTPCLALAMFNAQGIPAACEGELNALIGMMIIRKFFDEPAFMGNLADFDENHVVIAHCTAPLVSKYVLRTHFESGRGVGVAVEFPPGKATLFKIRGRHAVVAGVEVEGNEFLESRCRTQVRLKLEDAPEFVDGTLGNHHLLAYVDPEELSDLLSELGFEVMLY

SEQ ID NO: 1960 - protein, 272 aa, Thermococcus kodakaraensis KOD1
  misc_feature (321437)..(321437): n is a or c or g or t.
  misc_feature (52783)..(527833): n is a or c or g or t.
  misc_feature (527901)..(527901): n is a or c or g or t.
  misc_feature (527978)..(527978): n is a or c or g or t.
  misc_feature (960838)..(960839): n is a or c or g or t.
  misc_feature (960860)..(960861): n is a or c or g or t.
  misc_feature (960872)..(960873): n is a or c or g or t.
  misc_feature (960879)..(960879): n is a or c or g or t.
  misc_feature (960890)..(960890): n is a or c or g or t.
  misc_feature (1250239)..(1250239): n is a or c or g or t.
  misc_feature (1302432)..(1302434): n is a or c or g or t.
  misc_feature (1302471)..(1302471): n is a or c or g or t.
  misc_feature (1302488)..(1302488): n is a or c or g or t.
  misc_feature (1674836)..(1674836): n is a or c or g or t.
MKVVMTTKVDLASMNIREKLIENFGFKEDELLFDGNPVYQKDDVVILTTNQEMIYYDGLDRAIERQTGIKPEIIAFASRHSSKQKLPALTTHVTGNWGGALYGGKDESLAIAQPSAMKLALLKMNELNDLGWTVCYEATHHGPSELDVPSFFIEIGSSEEEWVNDRAGEIVAETIIYVLENYQNSKFKVAVGIGGGHYAPKQTKRALQTDLAFGHIAPKYAHPLSKELLLKAIERTAERVDAIYVDWKGSKGETRQMARAVAEELGLEFIRD

SEQ ID NO: 1961 - protein, 165 aa, Thermococcus kodakaraensis KOD1
  misc_feature (321437)..(321437): n is a or c or g or t.
  misc_feature (52783)..(527833): n is a or c or g or t.
  misc_feature (527901)..(527901): n is a or c or g or t.
  misc_feature (527978)..(527978): n is a or c or g or t.
  misc_feature (960838)..(960839): n is a or c or g or t.
  misc_feature (960860)..(960861): n is a or c or g or t.
  misc_feature (960872)..(960873): n is a or c or g or t.
  misc_feature (960879)..(960879): n is a or c or g or t.
  misc_feature (960890)..(960890): n is a or c or g or t.
  misc_feature (1250239)..(1250239): n is a or c or g or t.
  misc_feature (1302432)..(1302434): n is a or c or g or t.
  misc_feature (1302471)..(1302471): n is a or c or g or t.
  misc_feature (1302488)..(1302488): n is a or c or g or t.
  misc_feature (1674836)..(1674836): n is a or c or g or t.
MAQVVEVLVEGGKASPGPPLGPAIGPLGLNVKQVVDEINKATKEFEGMQVPVKIIVEDPKKKTFRIEVGIPPTSQLIKKELGIPKGSSEAGHTPAGNLTMEQVIKIAKMKIDQMLAPNLKAAAKEVIGTALSMGVTVEGKDPREVQREIDEGVYDELFAKAEEAQ

SEQ ID NO: 1962 - protein, 67 aa, Thermococcus kodakaraensis KOD1
  misc_feature (321437)..(321437): n is a or c or g or t.
  misc_feature (52783)..(527833): n is a or c or g or t.
  misc_feature (527901)..(527901): n is a or c or g or t.
  misc_feature (527978)..(527978): n is a or c or g or t.
  misc_feature (960838)..(960839): n is a or c or g or t.
  misc_feature (960860)..(960861): n is a or c or g or t.
  misc_feature (960872)..(960873): n is a or c or g or t.
  misc_feature (960879)..(960879): n is a or c or g or t.
  misc_feature (960890)..(960890): n is a or c or g or t.
  misc_feature (1250239)..(1250239): n is a or c or g or t.
  misc_feature (1302432)..(1302434): n is a or c or g or t.
  misc_feature (1302471)..(1302471): n is a or c or g or t.
  misc_feature (1302488)..(1302488): n is a or c or g or t.
  misc_feature (1674836)..(1674836): n is a or c or g or t.
MAELPIAPVDRLIRKAGAERVSEDAAKVLAEYLEEYAIELSKKAVDFARHAGRKTVKAEDIKLAIKA

SEQ ID NO: 1963 - protein, 464 aa, Thermococcus kodakaraensis KOD1
  misc_feature (321437)..(321437): n is a or c or g or t.
  misc_feature (52783)..(527833): n is a or c or g or t.
  misc_feature (527901)..(527901): n is a or c or g or t.
  misc_feature (527978)..(527978): n is a or c or g or t.
  misc_feature (960838)..(960839): n is a or c or g or t.
  misc_feature (960860)..(960861): n is a or c or g or t.
  misc_feature (960872)..(960873): n is a or c or g or t.
  misc_feature (960879)..(960879): n is a or c or g or t.
  misc_feature (960890)..(960890): n is a or c or g or t.
  misc_feature (1250239)..(1250239): n is a or c or g or t.
  misc_feature (1302432)..(1302434): n is a or c or g or t.
  misc_feature (1302471)..(1302471): n is a or c or g or t.
  misc_feature (1302488)..(1302488): n is a or c or g or t.
  misc_feature (1674836)..(1674836): n is a or c or g or t.
MKRKKTVLQQILSEKRKKVKEGDSMSGKDEFGTTKYVIYAEFEANGVVERPDVVGAIFGQTEGLLGDDLDLRELQKTGRIGRIRVEVHNKAGKTYGTITVPSSLDRVETAVLAAALETIDRVGPAEARIKVLRIEDVRATKRKYIIERAKEILETLMEQEIPETQEITEEVKKAVRAKELIEYGPEKLPAGPHVPFSDSIIVVEGRADVLNLLKHGIKNAIAVEGTSIPETIIKLSKERIVTAFTDGDRGGELILKELLQVADVDYVARAPEGKEVEELTKKEIVKALRSKVPAEQVINEMFNKGRSFYELIRERESEGERQPRQVTKPEPEVVKAQPKAETPEEKREPATVVRPSAEKIVKPIETSKSAPELEEFREFIERVKKDGIALLLDENKNVIAEIPVRELTNQLKERKDVYAVVFNGVITQRLIDTVSESGVKYIVGARKYNVVRRPVSLKIITFAE

SEQ ID NO: 1964 - protein, 232 aa, Thermococcus kodakaraensis KOD1
  misc_feature (321437)..(321437): n is a or c or g or t.
  misc_feature (52783)..(527833): n is a or c or g or t.
  misc_feature (527901)..(527901): n is a or c or g or t.
  misc_feature (527978)..(527978): n is a or c or g or t.
  misc_feature (960838)..(960839): n is a or c or g or t.
  misc_feature (960860)..(960861): n is a or c or g or t.
  misc_feature (960872)..(960873): n is a or c or g or t.
  misc_feature (960879)..(960879): n is a or c or g or t.
  misc_feature (960890)..(960890): n is a or c or g or t.
  misc_feature (1250239)..(1250239): n is a or c or g or t.
  misc_feature (1302432)..(1302434): n is a or c or g or t.
  misc_feature (1302471)..(1302471): n is a or c or g or t.
  misc_feature (1302488)..(1302488): n is a or c or g or t.
  misc_feature (1674836)..(1674836): n is a or c or g or t.
MRVLTLGHRGCRGKIENTIPAFKRALRWADGVEMDVRVTGDGKIIVHHDEGFWSDGEYYCVSELTFAEIKRLHPLGKLVPSVEEVIRSVSGFFDFDVKEPEAVEPLLNLVEKNSLFASSVFSADNPDIVRKLISECPDCRVGFSIIGYSNALLLPTLKGLYSVHVPIDAVSYIGFRNLTAILRAARKRGLKIFLWNYRMDEVRWVPRLLPFVDAVISDDPARLRKAFMNGAY

SEQ ID NO: 1965 - protein, 282 aa, Thermococcus kodakaraensis KOD1
  misc_feature (321437)..(321437): n is a or c or g or t.
  misc_feature (52783)..(527833): n is a or c or g or t.
  misc_feature (527901)..(527901): n is a or c or g or t.
  misc_feature (527978)..(527978): n is a or c or g or t.
  misc_feature (960838)..(960839): n is a or c or g or t.
  misc_feature (960860)..(960861): n is a or c or g or t.
  misc_feature (960872)..(960873): n is a or c or g or t.
  misc_feature (960879)..(960879): n is a or c or g or t.
  misc_feature (960890)..(960890): n is a or c or g or t.
  misc_feature (1250239)..(1250239): n is a or c or g or t.
  misc_feature (1302432)..(1302434): n is a or c or g or t.
  misc_feature (1302471)..(1302471): n is a or c or g or t.
  misc_feature (1302488)..(1302488): n is a or c or g or t.
  misc_feature (1674836)..(1674836): n is a or c or g or t.
MAGIDYFEIHPRKGEYYLFDDDVPGPRRVLFPTPTPISKGIVVTTEISGHLMIGPNAQDLPPEEKDNLATTEEGLREVWEGAKKLWPNLPPKSKVIRTFAGLRPEPTGGDFIIKAEEEVWGFINVAGIRSPGLTSAPAIAYEVRDIIQRDLGINLVEKEKWNPYRKDITHFFMLPPEKANELIKKNPSYGKIVCRCNHVSEGDILEAIERMKFIGVKTPSVDSVKFRTKATTGTCQGSFCRPKIVQLLAREYGVEPWEVTLKGRGSEIGIGDVKALLRGEEA

SEQ ID NO: 1966 - protein, 431 aa, Thermococcus kodakaraensis KOD1
  misc_feature (321437)..(321437): n is a or c or g or t.
  misc_feature (52783)..(527833): n is a or c or g or t.
  misc_feature (527901)..(527901): n is a or c or g or t.
  misc_feature (527978)..(527978): n is a or c or g or t.
  misc_feature (960838)..(960839): n is a or c or g or t.
  misc_feature (960860)..(960861): n is a or c or g or t.
  misc_feature (960872)..(960873): n is a or c or g or t.
  misc_feature (960879)..(960879): n is a or c or g or t.
  misc_feature (960890)..(960890): n is a or c or g or t.
  misc_feature (1250239)..(1250239): n is a or c or g or t.
  misc_feature (1302432)..(1302434): n is a or c or g or t.
  misc_feature (1302471)..(1302471): n is a or c or g or t.
  misc_feature (1302488)..(1302488): n is a or c or g or t.
  misc_feature (1674836)..(1674836): n is a or c or g or t.
MKAVKALAVLALLLGNLGFVSAWPTNGPTLDDPMNVHQKLTYKAIEAVYADNPGLGAILMQYKDQLLYGAYDEDWRGGNITFNGKVYTLQSQYHFLDPMDHAELITVDLFGDGKSSAADMAQQLYDQAVQLWKQGKKEEAMLYLGRAVHILEDMSMLIAHTTPHLFETLDEFSYAEEAHDFVENDISPTVADDILNNRVPLDLTPIKWWQIPQEKQRFIIGEDIYVADNENGHMDLSHGVAWAYADMIAHNAWRYMLYSTGKDINLWSERGHLGSYFWTKELKKGDWSILKLQFLGASSITIVFKDIDMQNAYFKTLGYVEIYDKNWNLIARYAQDPNPLVDTSVTVPGDTVYIYTHVDKDDWLDDDVDGWAIRNIELHANFDVNAPSGFKTLDGREYSKVQWAVYETMQYDIRAVAGLMEKFFEDVGVSG

SEQ ID NO: 1967 - protein, 505 aa, Thermococcus kodakaraensis KOD1
  misc_feature (321437)..(321437): n is a or c or g or t.
  misc_feature (52783)..(527833): n is a or c or g or t.
  misc_feature (527901)..(527901): n is a or c or g or t.
  misc_feature (527978)..(527978): n is a or c or g or t.
  misc_feature (960838)..(960839): n is a or c or g or t.
  misc_feature (960860)..(960861): n is a or c or g or t.
  misc_feature (960872)..(960873): n is a or c or g or t.
  misc_feature (960879)..(960879): n is a or c or g or t.
  misc_feature (960890)..(960890): n is a or c or g or t.
  misc_feature (1250239)..(1250239): n is a or c or g or t.
  misc_feature (1302432)..(1302434): n is a or c or g or t.
  misc_feature (1302471)..(1302471): n is a or c or g or t.
  misc_feature (1302488)..(1302488): n is a or c or g or t.
  misc_feature (1674836)..(1674836): n is a or c or g or t.
VMKMFHQAKWDEPTIFELSRPGRIGYTLPKPIEDVDVDIPEKLRRKSPLNLPELSEPEVVKHYTRLSEMNYGVDSGIYPLGSCTMKYNPKINEEIASHPGVAYVHPYQDEGTVQGALKIMWELEQWLKEITGMDRFTLQPAAGANGEFTGVSIIRAYHIDRGETQRTEMLVPDSAHGTNPASAAMAGFKVIEIPSNENGTVDLEALENAVSERTAGLMLTNPNTLGIFEDEILEIAKIVHKAGGLLYYDGANLNAVLGKIRPGDMGFDVVHLNLHKTFSTPHGGGGPGSGPVGVKDFLKDYLPVPLVSYDAENDRYYLDYNVPRSIGKVKELYGNFAVIVRALTYLKIMGREGLKEVSEVAVLNANYLTQKLKGTRGYELPGKELRKHETVFSAEPMKKETGVKALDVAKRLLDFCMHAPTIYFPLIVHEALMIEPTETVSKEELDAYVEALKRISEEAYSNPEVVTSAPHNTAVRRVDDVLAAKKPVITWRMYRELKERGEIDY

SEQ ID NO: 1968 - protein, 108 aa, Thermococcus kodakaraensis KOD1
  misc_feature (321437)..(321437): n is a or c or g or t.
  misc_feature (52783)..(527833): n is a or c or g or t.
  misc_feature (527901)..(527901): n is a or c or g or t.
  misc_feature (527978)..(527978): n is a or c or g or t.
  misc_feature (960838)..(960839): n is a or c or g or t.
  misc_feature (960860)..(960861): n is a or c or g or t.
  misc_feature (960872)..(960873): n is a or c or g or t.
  misc_feature (960879)..(960879): n is a or c or g or t.
  misc_feature (960890)..(960890): n is a or c or g or t.
  misc_feature (1250239)..(1250239): n is a or c or g or t.
  misc_feature (1302432)..(1302434): n is a or c or g or t.
  misc_feature (1302471)..(1302471): n is a or c or g or t.
  misc_feature (1302488)..(1302488): n is a or c or g or t.
  misc_feature (1674836)..(1674836): n is a or c or g or t.
VPKMTTINIDISQIANTVLGIIISFLIIRVYQLGERSARNEEKIKENTEQFDKMNKTIENINKNILDLKERMSKVEKGLDDLPTLILTTLEKELANLENRIIRGEHHD

SEQ ID NO: 1969 - protein, 40 aa, Thermococcus kodakaraensis KOD1
  misc_feature (321437)..(321437): n is a or c or g or t.
  misc_feature (52783)..(527833): n is a or c or g or t.
  misc_feature (527901)..(527901): n is a or c or g or t.
  misc_feature (527978)..(527978): n is a or c or g or t.
  misc_feature (960838)..(960839): n is a or c or g or t.
  misc_feature (960860)..(960861): n is a or c or g or t.
  misc_feature (960872)..(960873): n is a or c or g or t.
  misc_feature (960879)..(960879): n is a or c or g or t.
  misc_feature (960890)..(960890): n is a or c or g or t.
  misc_feature (1250239)..(1250239): n is a or c or g or t.
  misc_feature (1302432)..(1302434): n is a or c or g or t.
  misc_feature (1302471)..(1302471): n is a or c or g or t.
  misc_feature (1302488)..(1302488): n is a or c or g or t.
  misc_feature (1674836)..(1674836): n is a or c or g or t.
VREVVGMEDWKKIMSVDFAMNVLGVIIGLIVYNKFLKGKF

SEQ ID NO: 1970 - protein, 314 aa, Thermococcus kodakaraensis KOD1
  misc_feature (321437)..(321437): n is a or c or g or t.
  misc_feature (52783)..(527833): n is a or c or g or t.
  misc_feature (527901)..(527901): n is a or c or g or t.
  misc_feature (527978)..(527978): n is a or c or g or t.
  misc_feature (960838)..(960839): n is a or c or g or t.
  misc_feature (960860)..(960861): n is a or c or g or t.
  misc_feature (960872)..(960873): n is a or c or g or t.
  misc_feature (960879)..(960879): n is a or c or g or t.
  misc_feature (960890)..(960890): n is a or c or g or t.
  misc_feature (1250239)..(1250239): n is a or c or g or t.
  misc_feature (1302432)..(1302434): n is a or c or g or t.
  misc_feature (1302471)..(1302471): n is a or c or g or t.
  misc_feature (1302488)..(1302488): n is a or c or g or t.
  misc_feature (1674836)..(1674836): n is a or c or g or t.
VYKVKETLDDVLNLTVKSVDIPRNGVIDSIALLTKLTLSNSGASDTNVTMEDVLKAINEIRVVSNGNVVHYALKGTDIGYLNIYDTHGKALSLNDTVSVPAGGTQDVQFLMVLDAGKIHALIKDQLQIKAEWNTSVATNVSLSDAEVKITLDKEVYESGSEYVAVYSAGDYGEIFIEEPKVYAIEKAFNQLGELTEVFELPVGSVLKRALMVFYDDTGARADIVDKYALVRTRPARIQLYKIDYNTSRELDKVQYKLSSVPTGMTMFDYDREVVIGGLDLREESSGTFKIALKTTSAGKLRYISHEIVPQVISL

SEQ ID NO: 1971 - protein, 93 aa, Thermococcus kodakaraensis KOD1
  misc_feature (321437)..(321437): n is a or c or g or t.
  misc_feature (52783)..(527833): n is a or c or g or t.
  misc_feature (527901)..(527901): n is a or c or g or t.
  misc_feature (527978)..(527978): n is a or c or g or t.
  misc_feature (960838)..(960839): n is a or c or g or t.
  misc_feature (960860)..(960861): n is a or c or g or t.
  misc_feature (960872)..(960873): n is a or c or g or t.
  misc_feature (960879)..(960879): n is a or c or g or t.
  misc_feature (960890)..(960890): n is a or c or g or t.
  misc_feature (1250239)..(1250239): n is a or c or g or t.
  misc_feature (1302432)..(1302434): n is a or c or g or t.
  misc_feature (1302471)..(1302471): n is a or c or g or t.
  misc_feature (1302488)..(1302488): n is a or c or g or t.
  misc_feature (1674836)..(1674836): n is a or c or g or t.
MTLDQLVKYGRELERKKREWEKQNPEKATPTLDVWKPDVPDHLKPYEADDELYRKLNDWITGGRTEVIPKRKDLPKPIPLPKPRTPEPIAIPI

SEQ ID NO: 1972 - protein, 98 aa, Thermococcus kodakaraensis KOD1
  misc_feature (321437)..(321437): n is a or c or g or t.
  misc_feature (52783)..(527833): n is a or c or g or t.
  misc_feature (527901)..(527901): n is a or c or g or t.
  misc_feature (527978)..(527978): n is a or c or g or t.
  misc_feature (960838)..(960839): n is a or c or g or t.
  misc_feature (960860)..(960861): n is a or c or g or t.
  misc_feature (960872)..(960873): n is a or c or g or t.
  misc_feature (960879)..(960879): n is a or c or g or t.
  misc_feature (960890)..(960890): n is a or c or g or t.
  misc_feature (1250239)..(1250239): n is a or c or g or t.
  misc_feature (1302432)..(1302434): n is a or c or g or t.
  misc_feature (1302471)..(1302471): n is a or c or g or t.
  misc_feature (1302488)..(1302488): n is a or c or g or t.
  misc_feature (1674836)..(1674836): n is a or c or g or t.
MVGKVATSIRFRFLSGEEVATDLITLIANKIHEKPEDVAWFIEVKAVMDKLGTGEFSKNAKPEPLKTSKSVRELMDEVRKSYKKFKRIEAKMKKAGLV

SEQ ID NO: 1973 - protein, 130 aa, Thermococcus kodakaraensis KOD1
  misc_feature (321437)..(321437): n is a or c or g or t.
  misc_feature (52783)..(527833): n is a or c or g or t.
  misc_feature (527901)..(527901): n is a or c or g or t.
  misc_feature (527978)..(527978): n is a or c or g or t.
  misc_feature (960838)..(960839): n is a or c or g or t.
  misc_feature (960860)..(960861): n is a or c or g or t.
  misc_feature (960872)..(960873): n is a or c or g or t.
  misc_feature (960879)..(960879): n is a or c or g or t.
  misc_feature (960890)..(960890): n is a or c or g or t.
  misc_feature (1250239)..(1250239): n is a or c or g or t.
  misc_feature (1302432)..(1302434): n is a or c or g or t.
  misc_feature (1302471)..(1302471): n is a or c or g or t.
  misc_feature (1302488)..(1302488): n is a or c or g or t.
  misc_feature (1674836)..(1674836): n is a or c or g or t.
VMWMKVRYWLGWGVIFAIVLGLFIAASNRGSVTLGVGSIFIGVLIATAYERYLERIGEVIVDERIERISEKSYALSMRVLGFTIALTFVSTSIISQRDPFWKSASIVSGLFMFVYALLPLFARAHYEEVM

SEQ ID NO: 1974 - protein, 423 aa, Thermococcus kodakaraensis KOD1
  misc_feature (321437)..(321437): n is a or c or g or t.
  misc_feature (52783)..(527833): n is a or c or g or t.
  misc_feature (527901)..(527901): n is a or c or g or t.
  misc_feature (527978)..(527978): n is a or c or g or t.
  misc_feature (960838)..(960839): n is a or c or g or t.
  misc_feature (960860)..(960861): n is a or c or g or t.
  misc_feature (960872)..(960873): n is a or c or g or t.
  misc_feature (960879)..(960879): n is a or c or g or t.
  misc_feature (960890)..(960890): n is a or c or g or t.
  misc_feature (1250239)..(1250239): n is a or c or g or t.
  misc_feature (1302432)..(1302434): n is a or c or g or t.
  misc_feature (1302471)..(1302471): n is a or c or g or t.
  misc_feature (1302488)..(1302488): n is a or c or g or t.
  misc_feature (1674836)..(1674836): n is a or c or g or t.
MSDFWVLAKKEIMNLIRDKKLLFGLIIVPLVLYPALGKMMQVGIEQAQKETHVAIANFDDGKYGELLIRALNVTPNVTVTVISASSPEEALEKASAMEQNVLVVIPHNFSTAIENNQKAEVEIYGIFNTIGTGIRESVSEARIKVVLDVLSEELAKIKIKNAGFENPDAVLKPIEAVSRSVIRGRVVDVSPSLVSSVLASQSTSLPLIVFLMVTITAQMSAGAVAAEKENKTLETLLTLPVKRTTIVASKITGTAVMGLIAALAYMVGLRSYLGTFQTETGISLSDLGLGVTPEGMLLFALVVFLTIVFALSLAMLLAVYAEDVQSANTVVSSVILPLAFPAFLLMFVDLSQLPVFARYGLLAIPFTHPIAAYRYAITGEYAPMLFSVAYLAVVALITLYLTARVFSSEKVLTAKISWGKKRR

SEQ ID NO: 1975 - protein, 253 aa, Thermococcus kodakaraensis KOD1
  misc_feature (321437)..(321437): n is a or c or g or t.
  misc_feature (52783)..(527833): n is a or c or g or t.
  misc_feature (527901)..(527901): n is a or c or g or t.
  misc_feature (527978)..(527978): n is a or c or g or t.
  misc_feature (960838)..(960839): n is a or c or g or t.
  misc_feature (960860)..(960861): n is a or c or g or t.
  misc_feature (960872)..(960873): n is a or c or g or t.
  misc_feature (960879)..(960879): n is a or c or g or t.
  misc_feature (960890)..(960890): n is a or c or g or t.
  misc_feature (1250239)..(1250239): n is a or c or g or t.
  misc_feature (1302432)..(1302434): n is a or c or g or t.
  misc_feature (1302471)..(1302471): n is a or c or g or t.
  misc_feature (1302488)..(1302488): n is a or c or g or t.
  misc_feature (1674836)..(1674836): n is a or c or g or t.
MISVGDRVLLVDPRGKRYLVKVEDKEFHTDLGILNLGELIGKPYGAKIQSHRGETFTALKPDINDIIAKMRRGPQIVHPKDAGIIIAYAGISPGDTVIEAGAGSGALTIFLANAVGPTGKVISYEVRKDFYEIAKKNVELAGFSDRVVLKNKSIYDGIDEKEADHIVLDLPQPENVLPHAVDVLRPGGYFVAYTPCMNQVHRFFRALEEFKGEFMRPRVVEVLVREQEVKRECMRPKTTMLAHTGYITFLRKL

SEQ ID NO: 1976 - protein, 482 aa, Thermococcus kodakaraensis KOD1
  misc_feature (321437)..(321437): n is a or c or g or t.
  misc_feature (52783)..(527833): n is a or c or g or t.
  misc_feature (527901)..(527901): n is a or c or g or t.
  misc_feature (527978)..(527978): n is a or c or g or t.
  misc_feature (960838)..(960839): n is a or c or g or t.
  misc_feature (960860)..(960861): n is a or c or g or t.
  misc_feature (960872)..(960873): n is a or c or g or t.
  misc_feature (960879)..(960879): n is a or c or g or t.
  misc_feature (960890)..(960890): n is a or c or g or t.
  misc_feature (1250239)..(1250239): n is a or c or g or t.
  misc_feature (1302432)..(1302434): n is a or c or g or t.
  misc_feature (1302471)..(1302471): n is a or c or g or t.
  misc_feature (1302488)..(1302488): n is a or c or g or t.
  misc_feature (1674836)..(1674836): n is a or c or g or t.
VMPRRKLIKERVPTPERPPEERIKDFKEVNLGYTFELAVKEAERCLQCPYEYAPCIKGCPVHINIPGFISKLVEYRDDPDKAVKEALNVIWACNSLPATTGRVCPQEDQCEMNCVMGKVGDKINIGKLERFVADYAREKGIDEELLFEIIPKIEKKGQKVAIIGAGPAGLTAAGELAKLGYDVTIYEALHEPGGVLMYGIPEFRLPKEIVNKEIEKLRKLGVKILTDHVVGRTVTIEELLQEYDAVFIGSGAGTPRLINAPGINLNGIYTANEFLTRVNLMKAYLFPEYDTPVYVGKKVIVIGAGNTAMDAARSARRFGAEVTIAYRRGEEDVSAREEEVEHAKEEGIKFVYFVNPVEFIGDENGRVKAVKFEKMKALDERDARGKRKIVGTGEYVTLEADTVIIAIGKHPNRLIINTPGLKVERGKIVVDENLMTSIPGVFAGGDAIRGEATVILAMGDGRKAAKAIHEYLTKKRQEKANA

SEQ ID NO: 1977 - protein, 384 aa, Thermococcus kodakaraensis KOD1
  misc_feature (321437)..(321437): n is a or c or g or t.
  misc_feature (52783)..(527833): n is a or c or g or t.
  misc_feature (527901)..(527901): n is a or c or g or t.
  misc_feature (527978)..(527978): n is a or c or g or t.
  misc_feature (960838)..(960839): n is a or c or g or t.
  misc_feature (960860)..(960861): n is a or c or g or t.
  misc_feature (960872)..(960873): n is a or c or g or t.
  misc_feature (960879)..(960879): n is a or c or g or t.
  misc_feature (960890)..(960890): n is a or c or g or t.
  misc_feature (1250239)..(1250239): n is a or c or g or t.
  misc_feature (1302432)..(1302434): n is a or c or g or t.
  misc_feature (1302471)..(1302471): n is a or c or g or t.
  misc_feature (1302488)..(1302488): n is a or c or g or t.
  misc_feature (1674836)..(1674836): n is a or c or g or t.
MKIALVSDWYYPKIGGVATHMHQLAIYLKKLGHDVSIVTNDLKTGKEKELEELGVGLVKVPGVISPVLGINITYGLKSNRELGEFLVDFDVVHAHHAFTPLSLKAVKAGRTLEKATLLTTHSISFSHESSLWKALGLTFPLLNHYLKYPHEIIAVSKAAKAFVEHFTDSPVRVIPNGVDDERFRPLSNKERELVREELGINGDLILYVSRMSFRKGPHVLLNAFQNIAREKEDVTLVMVGSGEMLPFLKAQAKFLGIEDHVRFMGYVPDGLLPKLYASADVFVLSSTTAEAFGIVVLEAMASGIPVVTTTVGGIPEVVKESESGILVPPGDEAALAEAVLKLLSDKGLAKKFGEAGRKAVETCYSWKVVAGEIEKVYEEVLSEL

SEQ ID NO: 1978 - protein, 111 aa, Thermococcus kodakaraensis KOD1
  misc_feature (321437)..(321437): n is a or c or g or t.
  misc_feature (52783)..(527833): n is a or c or g or t.
  misc_feature (527901)..(527901): n is a or c or g or t.
  misc_feature (527978)..(527978): n is a or c or g or t.
  misc_feature (960838)..(960839): n is a or c or g or t.
  misc_feature (960860)..(960861): n is a or c or g or t.
  misc_feature (960872)..(960873): n is a or c or g or t.
  misc_feature (960879)..(960879): n is a or c or g or t.
  misc_feature (960890)..(960890): n is a or c or g or t.
  misc_feature (1250239)..(1250239): n is a or c or g or t.
  misc_feature (1302432)..(1302434): n is a or c or g or t.
  misc_feature (1302471)..(1302471): n is a or c or g or t.
  misc_feature (1302488)..(1302488): n is a or c or g or t.
  misc_feature (1674836)..(1674836): n is a or c or g or t.
MMREVLEEVIAEFWELGLPEVKERELALPTNLDTALSIFGLRRVGKTHFLYATMKRLMGSGLPFRRLFYVNFEDERLVGMTAKDLSSIVELYHKHNPGARFSTFSLTRCRL

SEQ ID NO: 1979 - protein, 70 aa, Thermococcus kodakaraensis KOD1
  misc_feature (321437)..(321437): n is a or c or g or t.
  misc_feature (52783)..(527833): n is a or c or g or t.
  misc_feature (527901)..(527901): n is a or c or g or t.
  misc_feature (527978)..(527978): n is a or c or g or t.
  misc_feature (960838)..(960839): n is a or c or g or t.
  misc_feature (960860)..(960861): n is a or c or g or t.
  misc_feature (960872)..(960873): n is a or c or g or t.
  misc_feature (960879)..(960879): n is a or c or g or t.
  misc_feature (960890)..(960890): n is a or c or g or t.
  misc_feature (1250239)..(1250239): n is a or c or g or t.
  misc_feature (1302432)..(1302434): n is a or c or g or t.
  misc_feature (1302471)..(1302471): n is a or c or g or t.
  misc_feature (1302488)..(1302488): n is a or c or g or t.
  misc_feature (1674836)..(1674836): n is a or c or g or t.
MSDEGYPAEVIEIVGRTGVTGGVTQVKVRILEGRDKGRVIRRNVKGPVRVGDIVILRETEREAREIRRRR

SEQ ID NO: 1980 - protein, 480 aa, Thermococcus kodakaraensis KOD1
  misc_feature (321437)..(321437): n is a or c or g or t.
  misc_feature (52783)..(527833): n is a or c or g or t.
  misc_feature (527901)..(527901): n is a or c or g or t.
  misc_feature (527978)..(527978): n is a or c or g or t.
  misc_feature (960838)..(960839): n is a or c or g or t.
  misc_feature (960860)..(960861): n is a or c or g or t.
  misc_feature (960872)..(960873): n is a or c or g or t.
  misc_feature (960879)..(960879): n is a or c or g or t.
  misc_feature (960890)..(960890): n is a or c or g or t.
  misc_feature (1250239)..(1250239): n is a or c or g or t.
  misc_feature (1302432)..(1302434): n is a or c or g or t.
  misc_feature (1302471)..(1302471): n is a or c or g or t.
  misc_feature (1302488)..(1302488): n is a or c or g or t.
  misc_feature (1674836)..(1674836): n is a or c or g or t.
VVGMERGKIQAMRQEILNGPIEKTLLKLAYPLIVSNLVQVLYNITDTFWLGKLGREALAAPGTSWPIIGTLMALGMGFATAGFAFVGQYIGAGNYERANRSAGALYSLMLFFSTATALISLAILPYALHFMKVTPNVYPYAKAYATVVFAGVPFSFTFMAFSALMRASGDTKTPVKISMLTVAMNILLDPLLIFGIGPFPEWGVAGAAIATVLSNATGALIGARLLTSGRAGLHLTRETLRPDMEFYSRIFRVGLPSAVGQSANSFGFVVLTRIIYGYGDVTYAAYTITTRLVNFITSIARGVSMAMGTMIAQNIGAERYERAKRIAERAMVINFLIASSAILIIGLFRVPVFKVFLDDPKVIAQSEYVLKYFLISVPFFNGIFVVVTRTFSSAGHTKKSMVLSMLRLWGFRIPLSYVFGYVAAVTVFGLRVPLAELFGMSPKGVFFGMGMSNFLAAIVAFIWFSRGTWMRRIIEEESKE

SEQ ID NO: 1981 - protein, 155 aa, Thermococcus kodakaraensis KOD1
  misc_feature (321437)..(321437): n is a or c or g or t.
  misc_feature (52783)..(527833): n is a or c or g or t.
  misc_feature (527901)..(527901): n is a or c or g or t.
  misc_feature (527978)..(527978): n is a or c or g or t.
  misc_feature (960838)..(960839): n is a or c or g or t.
  misc_feature (960860)..(960861): n is a or c or g or t.
  misc_feature (960872)..(960873): n is a or c or g or t.
  misc_feature (960879)..(960879): n is a or c or g or t.
  misc_feature (960890)..(960890): n is a or c or g or t.
  misc_feature (1250239)..(1250239): n is a or c or g or t.
  misc_feature (1302432)..(1302434): n is a or c or g or t.
  misc_feature (1302471)..(1302471): n is a or c or g or t.
  misc_feature (1302488)..(1302488): n is a or c or g or t.
  misc_feature (1674836)..(1674836): n is a or c or g or t.
VVMFMARGGLDEVDKKILMILQKNSRTPLREISKEVGLAESTIYERIKKLKEKGIIKKFTVILDPNALGFSILAFILIKAKAGMYGHVADQLKKYPEICEVYETTGDYDMIVKIRTRSSSELNEFLDKMGSIEGVDATHTMVVLKVHKETTELPL

SEQ ID NO: 1982 - protein, 370 aa, Thermococcus kodakaraensis KOD1
  misc_feature (321437)..(321437): n is a or c or g or t.
  misc_feature (52783)..(527833): n is a or c or g or t.
  misc_feature (527901)..(527901): n is a or c or g or t.
  misc_feature (527978)..(527978): n is a or c or g or t.
  misc_feature (960838)..(960839): n is a or c or g or t.
  misc_feature (960860)..(960861): n is a or c or g or t.
  misc_feature (960872)..(960873): n is a or c or g or t.
  misc_feature (960879)..(960879): n is a or c or g or t.
  misc_feature (960890)..(960890): n is a or c or g or t.
  misc_feature (1250239)..(1250239): n is a or c or g or t.
  misc_feature (1302432)..(1302434): n is a or c or g or t.
  misc_feature (1302471)..(1302471): n is a or c or g or t.
  misc_feature (1302488)..(1302488): n is a or c or g or t.
  misc_feature (1674836)..(1674836): n is a or c or g or t.
VTLYTLEILYNWQAEAKPKYFFFSSFPVVRMGVQIGELIPRKEIELESLYGKKVAIDAFNAMYQFLSTIRQRDGTPLMDSQGRITSHLSGFFYRTINLMEAGIKPAYVFDGKPPDFKKRELEKRREAREEAEEKWYEALEKGDLEEAKKYAMRATRVNEELINDAKKLLELMGIPVVQAPSEGEAQAAYMAAKKAVYASASQDYDSLLFGAPRLVRNLTITGRRKLPGKNVYVEVKPELVVLEEVLKELGIDREKLIELAILVGTDYNPGGIKGIGPKKALTIVKRTKDPLAKYQKESDVDLYAIKEFFLNPPVTDDYELKWREPDEEGILKFLCDEHDFSEERVKNGLERLKKAVKAGKQRTLESWFGR

SEQ ID NO: 1983 - protein, 125 aa, Thermococcus kodakaraensis KOD1
  misc_feature (321437)..(321437): n is a or c or g or t.
  misc_feature (52783)..(527833): n is a or c or g or t.
  misc_feature (527901)..(527901): n is a or c or g or t.
  misc_feature (527978)..(527978): n is a or c or g or t.
  misc_feature (960838)..(960839): n is a or c or g or t.
  misc_feature (960860)..(960861): n is a or c or g or t.
  misc_feature (960872)..(960873): n is a or c or g or t.
  misc_feature (960879)..(960879): n is a or c or g or t.
  misc_feature (960890)..(960890): n is a or c or g or t.
  misc_feature (1250239)..(1250239): n is a or c or g or t.
  misc_feature (1302432)..(1302434): n is a or c or g or t.
  misc_feature (1302471)..(1302471): n is a or c or g or t.
  misc_feature (1302488)..(1302488): n is a or c or g or t.
  misc_feature (1674836)..(1674836): n is a or c or g or t.
VIVGEVVSGLGEGAYYVRQYEPLIEEYLGFKPFPGTLNVKILFPKTVLDAVCNIRPVIIPGFVKDGRTFGDVKAYPVMIGGIKGAIVVPSRTIHPPRIAEIIAPVNLREALKLKDGDRVRLEVIQ

SEQ ID NO: 1984 - protein, 72 aa, Thermococcus kodakaraensis KOD1
  misc_feature (321437)..(321437): n is a or c or g or t.
  misc_feature (52783)..(527833): n is a or c or g or t.
  misc_feature (527901)..(527901): n is a or c or g or t.
  misc_feature (527978)..(527978): n is a or c or g or t.
  misc_feature (960838)..(960839): n is a or c or g or t.
  misc_feature (960860)..(960861): n is a or c or g or t.
  misc_feature (960872)..(960873): n is a or c or g or t.
  misc_feature (960879)..(960879): n is a or c or g or t.
  misc_feature (960890)..(960890): n is a or c or g or t.
  misc_feature (1250239)..(1250239): n is a or c or g or t.
  misc_feature (1302432)..(1302434): n is a or c or g or t.
  misc_feature (1302471)..(1302471): n is a or c or g or t.
  misc_feature (1302488)..(1302488): n is a or c or g or t.
  misc_feature (1674836)..(1674836): n is a or c or g or t.
VIAMVMRLSAIYGKQIYNTKGNYVGYVDEVLIEIDQGCGRVLALVLPGEKVGVPYDRVTAIGDIILVRAKEE

SEQ ID NO: 1985 - protein, 564 aa, Thermococcus kodakaraensis KOD1
  misc_feature (321437)..(321437): n is a or c or g or t.
  misc_feature (52783)..(527833): n is a or c or g or t.
  misc_feature (527901)..(527901): n is a or c or g or t.
  misc_feature (527978)..(527978): n is a or c or g or t.
  misc_feature (960838)..(960839): n is a or c or g or t.
  misc_feature (960860)..(960861): n is a or c or g or t.
  misc_feature (960872)..(960873): n is a or c or g or t.
  misc_feature (960879)..(960879): n is a or c or g or t.
  misc_feature (960890)..(960890): n is a or c or g or t.
  misc_feature (1250239)..(1250239): n is a or c or g or t.
  misc_feature (1302432)..(1302434): n is a or c or g or t.
  misc_feature (1302471)..(1302471): n is a or c or g or t.
  misc_feature (1302488)..(1302488): n is a or c or g or t.
  misc_feature (1674836)..(1674836): n is a or c or g or t.
MVVPMELPTKTPMVENAVVTSKMELSNLIQEALSQGSGVFLKIFSKDSRNKYYITLLLDSSKVLAAEGIVVDTKERYSGDKTVELFKALLDKPMIVDVYSLDEIELKLAIAENLETYSETPKVPINELFEEISEEPKVGIVEKPQPTKAAAPERERTAPKKAEKLPEIAPKKAETTTGPEISIKLRGEKIPEEAFMKYAEAIQRDSEKIRGIKIKKIEFTGNAEGGVVDLNVTVYGSSESKNRRDIEISERRIFHIVSKNAPIIFRVSEYKPRLKDIRVVLDGEEARPREITEKDKKRTDYIDKSKKIRLSVLEDMWPYFSNFAKTVIREIETSGMLVESAYFDIKGRREFEINLSIAVKGEYDKDTAERAVRAVLARHARELSKAIERYISIHTVTVEVIRPEGVVPTKPSVKPTSAKASEILAKKELLEKEVEKLLQEAGIDELAFLTEEKKKEAEQTLLKSRIEPAIETLKARIHAELKLVPRATFKWLKLNHEVQGSTVYVDIEASFAKEEVGGLFGAYSGISDEKIKQDVAETINRVIKEVSSEYSVSIRLRKLNIILR

SEQ ID NO: 1986 - protein, 163 aa, Thermococcus kodakaraensis KOD1
  misc_feature (321437)..(321437): n is a or c or g or t.
  misc_feature (52783)..(527833): n is a or c or g or t.
  misc_feature (527901)..(527901): n is a or c or g or t.
  misc_feature (527978)..(527978): n is a or c or g or t.
  misc_feature (960838)..(960839): n is a or c or g or t.
  misc_feature (960860)..(960861): n is a or c or g or t.
  misc_feature (960872)..(960873): n is a or c or g or t.
  misc_feature (960879)..(960879): n is a or c or g or t.
  misc_feature (960890)..(960890): n is a or c or g or t.
  misc_feature (1250239)..(1250239): n is a or c or g or t.
  misc_feature (1302432)..(1302434): n is a or c or g or t.
  misc_feature (1302471)..(1302471): n is a or c or g or t.
  misc_feature (1302488)..(1302488): n is a or c or g or t.
  misc_feature (1674836)..(1674836): n is a or c or g or t.
VVIGALLVVTAIIIVRRAEEEEQVDGLGFIYALLAPISWSVAITLLDYLSSDVPVLQLAGIRMMFAAIGISILLPKYYGEIRSITIGEFLTISGAAVLGLILGQYLFVYSVSSVGSPIAAPVSAINPIISSLLAVLLLGEKPNRRIFEGLALAVAGIILISTG

SEQ ID NO: 1987 - protein, 386 aa, Thermococcus kodakaraensis KOD1
  misc_feature (321437)..(321437): n is a or c or g or t.
  misc_feature (52783)..(527833): n is a or c or g or t.
  misc_feature (527901)..(527901): n is a or c or g or t.
  misc_feature (527978)..(527978): n is a or c or g or t.
  misc_feature (960838)..(960839): n is a or c or g or t.
  misc_feature (960860)..(960861): n is a or c or g or t.
  misc_feature (960872)..(960873): n is a or c or g or t.
  misc_feature (960879)..(960879): n is a or c or g or t.
  misc_feature (960890)..(960890): n is a or c or g or t.
  misc_feature (1250239)..(1250239): n is a or c or g or t.
  misc_feature (1302432)..(1302434): n is a or c or g or t.
  misc_feature (1302471)..(1302471): n is a or c or g or t.
  misc_feature (1302488)..(1302488): n is a or c or g or t.
  misc_feature (1674836)..(1674836): n is a or c or g or t.
MYLTKEEELILAGEYGYALQKAMEILVALGDIYGADRLIPIKSAQVAGVSYKNIGDAGIEFLRDFVEAGAKVSVYTTLNPAGIGDDEFMEKQMEVLELYRKMGIEVTSTCTPYYGANLPKFGDHIAWSESSAVSFANSILGARTNREGGPSSLAAAIVGKTPNYGLHLDENRKATVIVDVKAKVKTFADYSVLGYHVGKTLGNDVPYFKNLKPEKTEFLKELGAAMGATGSIALYHVEGETPEYREAITDKLETITVEDSDLKAVRESFQDDWSDIDMILIGCPHASLPEVKEIAELLRMRGKPLKIPLFITASRAVKALADALGYTEIIERYNGKIIPDSCFVVSPIKGWYRGIATNSGKSAFYFRSFGFSVRLDDVENLIKEAP

SEQ ID NO: 1988 - protein, 133 aa, Thermococcus kodakaraensis KOD1
  misc_feature (321437)..(321437): n is a or c or g or t.
  misc_feature (52783)..(527833): n is a or c or g or t.
  misc_feature (527901)..(527901): n is a or c or g or t.
  misc_feature (527978)..(527978): n is a or c or g or t.
  misc_feature (960838)..(960839): n is a or c or g or t.
  misc_feature (960860)..(960861): n is a or c or g or t.
  misc_feature (960872)..(960873): n is a or c or g or t.
  misc_feature (960879)..(960879): n is a or c or g or t.
  misc_feature (960890)..(960890): n is a or c or g or t.
  misc_feature (1250239)..(1250239): n is a or c or g or t.
  misc_feature (1302432)..(1302434): n is a or c or g or t.
  misc_feature (1302471)..(1302471): n is a or c or g or t.
  misc_feature (1302488)..(1302488): n is a or c or g or t.
  misc_feature (1674836)..(1674836): n is a or c or g or t.
MKLKGRKIVGGKAEGEVIVSRKPLSFLGGVDPETGIVTDAESDIRGQSIAGKILVFPRGKGSTVGSYVIYALKKNNKAPKAIIVGEAETIVATGAIISDIPMVDGVDVSKLKTGMKVRVDADSGEVEILEDGE

SEQ ID NO: 1989 - protein, 438 aa, Thermococcus kodakaraensis KOD1
  misc_feature (321437)..(321437): n is a or c or g or t.
  misc_feature (52783)..(527833): n is a or c or g or t.
  misc_feature (527901)..(527901): n is a or c or g or t.
  misc_feature (527978)..(527978): n is a or c or g or t.
  misc_feature (960838)..(960839): n is a or c or g or t.
  misc_feature (960860)..(960861): n is a or c or g or t.
  misc_feature (960872)..(960873): n is a or c or g or t.
  misc_feature (960879)..(960879): n is a or c or g or t.
  misc_feature (960890)..(960890): n is a or c or g or t.
  misc_feature (1250239)..(1250239): n is a or c or g or t.
  misc_feature (1302432)..(1302434): n is a or c or g or t.
  misc_feature (1302471)..(1302471): n is a or c or g or t.
  misc_feature (1302488)..(1302488): n is a or c or g or t.
  misc_feature (1674836)..(1674836): n is a or c or g or t.
VKMPRGIYECVNCGHREVLDSTEPVIERACPKCGGDMILVGYAVSGVESPNVRSGREEVPAPEGSGVSPGVEVPRESPHGLPPEVEAKLNEFYSLRFYGFDGHVAVFEVLDIYEKNFERVLRELENLGYWAALKKRDGRIVLFVFPAGKIPPDNPWLPWLFLVLTVLSTFFAGYYLALNYIATLEHYGLPGLRNPYIIALSFSVSVMAIIGTHELGHKIAATYHGVKATMPYFIPFPNILGTLGAVIRVKSPLPTRNAAIDLGVSGPIAGFLVAVPVTVLGLKLSVLVPMSMVPSTEGGLYFGTNLLFEALQRLVLNVQGDYVIFLHPVAIAGWVGILVTFLNLIPVAQLDGGHILRAFISEKAHKMITYAAALLLVGMSYLWSGWLIWAILIIFIGSAGNPGALDEVSPISKGRIVLALTALVIFVITATPRPLWTA

SEQ ID NO: 1990 - protein, 418 aa, Thermococcus kodakaraensis KOD1
  misc_feature (321437)..(321437): n is a or c or g or t.
  misc_feature (52783)..(527833): n is a or c or g or t.
  misc_feature (527901)..(527901): n is a or c or g or t.
  misc_feature (527978)..(527978): n is a or c or g or t.
  misc_feature (960838)..(960839): n is a or c or g or t.
  misc_feature (960860)..(960861): n is a or c or g or t.
  misc_feature (960872)..(960873): n is a or c or g or t.
  misc_feature (960879)..(960879): n is a or c or g or t.
  misc_feature (960890)..(960890): n is a or c or g or t.
  misc_feature (1250239)..(1250239): n is a or c or g or t.
  misc_feature (1302432)..(1302434): n is a or c or g or t.
  misc_feature (1302471)..(1302471): n is a or c or g or t.
  misc_feature (1302488)..(1302488): n is a or c or g or t.
  misc_feature (1674836)..(1674836): n is a or c or g or t.
VMLMSHKSAEMYELKKKVEELKSYRGRATELVSLYIPAGYDINKVMQQLREEYGTAQNIKSKSTRKNVLGALERAMQHLKLYKQTPENGLALFVGNVSEQEGVSDIKLWAIVPPEPLNVRLYRCDQTFVTEPLEEMLRVKDAYGLITVEKNEATIGLLRGKRIEVIDELTSNVPGKTRAGGQSARRYERIREQETHEFMKRIGEHANKAFLPLLEKGELRGIIIGGPGPTKEEFVEGDYLHHELRKKVIGVVDISYHGEYGLRELVEKASDILKDHEAVKERQLIQEFFKHLVKDTGMITYGEKEVRKALELGAVDKLLISEGYDKVRVRAKCNNCGWEELKTMSEGEFHVYKKQLTHCPKCGSQNITFEKWDVAEELIKMAEESGADVEIISLDTEEGQQFYKAFGGLGAILRYKIQ

SEQ ID NO: 1991 - protein, 358 aa, Thermococcus kodakaraensis KOD1
  misc_feature (321437)..(321437): n is a or c or g or t.
  misc_feature (52783)..(527833): n is a or c or g or t.
  misc_feature (527901)..(527901): n is a or c or g or t.
  misc_feature (527978)..(527978): n is a or c or g or t.
  misc_feature (960838)..(960839): n is a or c or g or t.
  misc_feature (960860)..(960861): n is a or c or g or t.
  misc_feature (960872)..(960873): n is a or c or g or t.
  misc_feature (960879)..(960879): n is a or c or g or t.
  misc_feature (960890)..(960890): n is a or c or g or t.
  misc_feature (1250239)..(1250239): n is a or c or g or t.
  misc_feature (1302432)..(1302434): n is a or c or g or t.
  misc_feature (1302471)..(1302471): n is a or c or g or t.
  misc_feature (1302488)..(1302488): n is a or c or g or t.
  misc_feature (1674836)..(1674836): n is a or c or g or t.
MLFDPRPKERREEIFDREKELESILNGMNEYPISLIIGIRRVGKSSLLKVALNEYSGIGIYMDTRRLYSAGSGSISSAMLVDEITRILLGKGRVGFLRGIKVEEINLLGLHLKPRESTWVDVLDRLEQFGRKTGKKVVIAFDEAQYLRFFGSRGGKDFLAGVAYAYDSLPNISFVFTGSEVGLLHDFVGIDDYSSPLYGRISEEIEIRAFPRELSEEFLRRGFAEVGVKVPEDEIRRAVDELDGIPGWLVEFGFNYWKKGSFEKAIETTMNRAKAMIKEELFELEKRSPRYALILKAISIGLSRWSQIKDYVEAKGGPITNARLNSLLVNLEKMGWIKKENGRYHIIDPVVEKVIKED

SEQ ID NO: 1992 - protein, 138 aa, Thermococcus kodakaraensis KOD1
  misc_feature (321437)..(321437): n is a or c or g or t.
  misc_feature (52783)..(527833): n is a or c or g or t.
  misc_feature (527901)..(527901): n is a or c or g or t.
  misc_feature (527978)..(527978): n is a or c or g or t.
  misc_feature (960838)..(960839): n is a or c or g or t.
  misc_feature (960860)..(960861): n is a or c or g or t.
  misc_feature (960872)..(960873): n is a or c or g or t.
  misc_feature (960879)..(960879): n is a or c or g or t.
  misc_feature (960890)..(960890): n is a or c or g or t.
  misc_feature (1250239)..(1250239): n is a or c or g or t.
  misc_feature (1302432)..(1302434): n is a or c or g or t.
  misc_feature (1302471)..(1302471): n is a or c or g or t.
  misc_feature (1302488)..(1302488): n is a or c or g or t.
  misc_feature (1674836)..(1674836): n is a or c or g or t.
MEHFIKSLTQCEPYPFLNFFVNHPHHRPNYNPTFKNFSRELTKGMGMKHHVGEHKAKKGLIRIEFDERDGRAENVRITGDFFIHPEETVHELESRLEGHKLEELEGIIDEFFAMRLDVEMPYINVEDFKIALKKALEG

SEQ ID NO: 1993 - protein, 423 aa, Thermococcus kodakaraensis KOD1
  misc_feature (321437)..(321437): n is a or c or g or t.
  misc_feature (52783)..(527833): n is a or c or g or t.
  misc_feature (527901)..(527901): n is a or c or g or t.
  misc_feature (527978)..(527978): n is a or c or g or t.
  misc_feature (960838)..(960839): n is a or c or g or t.
  misc_feature (960860)..(960861): n is a or c or g or t.
  misc_feature (960872)..(960873): n is a or c or g or t.
  misc_feature (960879)..(960879): n is a or c or g or t.
  misc_feature (960890)..(960890): n is a or c or g or t.
  misc_feature (1250239)..(1250239): n is a or c or g or t.
  misc_feature (1302432)..(1302434): n is a or c or g or t.
  misc_feature (1302471)..(1302471): n is a or c or g or t.
  misc_feature (1302488)..(1302488): n is a or c or g or t.
  misc_feature (1674836)..(1674836): n is a or c or g or t.
VVDVKEIAVIGLGYIGLPTAIMFANAGFRVTGYEIREDVVRSINSGKAHIIEPEIDELLKKAVSSGNLRATSDPEEIRNKDAYIICVQTPLKEDKTPDLSYLESAVRTVAERMKKGSLVVIESTVPPLTTVKMAKLIEEIRGFKAGEDFYMVHAPERVMPGRIFKELVYNSRIFGGITPESSEIAEKLYRSFVKGQTFKTSSTVSEVVKLMENTFRDVNIALANEFAFLAHQYGVNVFEAIELANTHPRVNIHLPGIGVGGHCLPKDPHLLLWPAKEDFGLIRTAREINDSMPLFTKDLLFSAFKQLNVPPEEAVVAVLGLAYKGNSDDTRNSPAIAFIDAIKDDVREVRSYDPFVGGSAESLEEALRGADAAVIATDHTAFKNLNWEELGKLMRTKILIDGRHIIDKPPRGFLFKGIGRGEY

SEQ ID NO: 1994 - protein, 130 aa, Thermococcus kodakaraensis KOD1
  misc_feature (321437)..(321437): n is a or c or g or t.
  misc_feature (52783)..(527833): n is a or c or g or t.
  misc_feature (527901)..(527901): n is a or c or g or t.
  misc_feature (527978)..(527978): n is a or c or g or t.
  misc_feature (960838)..(960839): n is a or c or g or t.
  misc_feature (960860)..(960861): n is a or c or g or t.
  misc_feature (960872)..(960873): n is a or c or g or t.
  misc_feature (960879)..(960879): n is a or c or g or t.
  misc_feature (960890)..(960890): n is a or c or g or t.
  misc_feature (1250239)..(1250239): n is a or c or g or t.
  misc_feature (1302432)..(1302434): n is a or c or g or t.
  misc_feature (1302471)..(1302471): n is a or c or g or t.
  misc_feature (1302488)..(1302488): n is a or c or g or t.
  misc_feature (1674836)..(1674836): n is a or c or g or t.
MNVLSALGEALVLIGTFFYFLSALGLIRMPDVYNRMQTSTKSATLGSLGVMVGVGLWAVGDGLSWSWFTKSVVIALFLLLTNPISAHALIRAAYKSGIPLWQGSVVDKYREHLEAKEKAETEASKEGGEE

SEQ ID NO: 1995 - protein, 114 aa, Thermococcus kodakaraensis KOD1
  misc_feature (321437)..(321437): n is a or c or g or t.
  misc_feature (52783)..(527833): n is a or c or g or t.
  misc_feature (527901)..(527901): n is a or c or g or t.
  misc_feature (527978)..(527978): n is a or c or g or t.
  misc_feature (960838)..(960839): n is a or c or g or t.
  misc_feature (960860)..(960861): n is a or c or g or t.
  misc_feature (960872)..(960873): n is a or c or g or t.
  misc_feature (960879)..(960879): n is a or c or g or t.
  misc_feature (960890)..(960890): n is a or c or g or t.
  misc_feature (1250239)..(1250239): n is a or c or g or t.
  misc_feature (1302432)..(1302434): n is a or c or g or t.
  misc_feature (1302471)..(1302471): n is a or c or g or t.
  misc_feature (1302488)..(1302488): n is a or c or g or t.
  misc_feature (1674836)..(1674836): n is a or c or g or t.
MISVYYFGAIALVLIGLYGVLVKKNLMKILISLSIMETGVNLLLISVGYVSGKSAPILSEGIKWNQAVDPIPQALVLTAIVIGVATTAMALSAAILIYEKYGTLNVEEIRRLRG

SEQ ID NO: 1996 - protein, 86 aa, Thermococcus kodakaraensis KOD1
  misc_feature (321437)..(321437): n is a or c or g or t.
  misc_feature (52783)..(527833): n is a or c or g or t.
  misc_feature (527901)..(527901): n is a or c or g or t.
  misc_feature (527978)..(527978): n is a or c or g or t.
  misc_feature (960838)..(960839): n is a or c or g or t.
  misc_feature (960860)..(960861): n is a or c or g or t.
  misc_feature (960872)..(960873): n is a or c or g or t.
  misc_feature (960879)..(960879): n is a or c or g or t.
  misc_feature (960890)..(960890): n is a or c or g or t.
  misc_feature (1250239)..(1250239): n is a or c or g or t.
  misc_feature (1302432)..(1302434): n is a or c or g or t.
  misc_feature (1302471)..(1302471): n is a or c or g or t.
  misc_feature (1302488)..(1302488): n is a or c or g or t.
  misc_feature (1674836)..(1674836): n is a or c or g or t.
VRKMNGGEIIGLLGMLLLVSAWVPQTWETVKTRKCPLNMKFIVIYVTAATLLTIYSWIIGDWIFFTLNFLSAFQSAINLVVKLMEK

SEQ ID NO: 1997 - protein, 156 aa, Thermococcus kodakaraensis KOD1
  misc_feature (321437)..(321437): n is a or c or g or t.
  misc_feature (52783)..(527833): n is a or c or g or t.
  misc_feature (527901)..(527901): n is a or c or g or t.
  misc_feature (527978)..(527978): n is a or c or g or t.
  misc_feature (960838)..(960839): n is a or c or g or t.
  misc_feature (960860)..(960861): n is a or c or g or t.
  misc_feature (960872)..(960873): n is a or c or g or t.
  misc_feature (960879)..(960879): n is a or c or g or t.
  misc_feature (960890)..(960890): n is a or c or g or t.
  misc_feature (1250239)..(1250239): n is a or c or g or t.
  misc_feature (1302432)..(1302434): n is a or c or g or t.
  misc_feature (1302471)..(1302471): n is a or c or g or t.
  misc_feature (1302488)..(1302488): n is a or c or g or t.
  misc_feature (1674836)..(1674836): n is a or c or g or t.
VSTMRVVWEKEIPAEKITVSPRPVWKCRTCPMYGKRPSCPPYAPDWKEAKEWVRSFKKALLVKFEVDMNDFENEKRKVLLWLLKKEAELFKQGKLYAMALFPGNCNLCDDCPFEHGEPCRMPEKVRPSIDAIGIEISSLVEIDFSESVLYGMVMVE

SEQ ID NO: 1998 - protein, 329 aa, Thermococcus kodakaraensis KOD1
  misc_feature (321437)..(321437): n is a or c or g or t.
  misc_feature (52783)..(527833): n is a or c or g or t.
  misc_feature (527901)..(527901): n is a or c or g or t.
  misc_feature (527978)..(527978): n is a or c or g or t.
  misc_feature (960838)..(960839): n is a or c or g or t.
  misc_feature (960860)..(960861): n is a or c or g or t.
  misc_feature (960872)..(960873): n is a or c or g or t.
  misc_feature (960879)..(960879): n is a or c or g or t.
  misc_feature (960890)..(960890): n is a or c or g or t.
  misc_feature (1250239)..(1250239): n is a or c or g or t.
  misc_feature (1302432)..(1302434): n is a or c or g or t.
  misc_feature (1302471)..(1302471): n is a or c or g or t.
  misc_feature (1302488)..(1302488): n is a or c or g or t.
  misc_feature (1674836)..(1674836): n is a or c or g or t.
VTEMAGEVVIEKPELQILINLLQEREKIRVSFPIYGTLLFTASPTERGYLLEVQAEKRDFHVRHPELPSYSDFYEAFISSGVITYDNIEDFKEMLELYRILRKGVVFSPDTNIFYHRFISNYRPLDGYQIVVAEDVKNEIESAMNYKYRSNYLHEIMSTVKNGHLLRELSNRRTKKARKAAYIALKEFEALRDRIIVVERYGEGHNNDERIVKTLKHYDEMSPAMVVFLTADLAITDVARIEGLEYFYFEYPTARLGTHEVSAYQLRTLIFNLAAVLGLVEVNGTLVYGEFGGKKRLNELKLIFRNGELQREFLFHLNLCRKLEKIMEG

SEQ ID NO: 1999 - protein, 134 aa, Thermococcus kodakaraensis KOD1
  misc_feature (321437)..(321437): n is a or c or g or t.
  misc_feature (52783)..(527833): n is a or c or g or t.
  misc_feature (527901)..(527901): n is a or c or g or t.
  misc_feature (527978)..(527978): n is a or c or g or t.
  misc_feature (960838)..(960839): n is a or c or g or t.
  misc_feature (960860)..(960861): n is a or c or g or t.
  misc_feature (960872)..(960873): n is a or c or g or t.
  misc_feature (960879)..(960879): n is a or c or g or t.
  misc_feature (960890)..(960890): n is a or c or g or t.
  misc_feature (1250239)..(1250239): n is a or c or g or t.
  misc_feature (1302432)..(1302434): n is a or c or g or t.
  misc_feature (1302471)..(1302471): n is a or c or g or t.
  misc_feature (1302488)..(1302488): n is a or c or g or t.
  misc_feature (1674836)..(1674836): n is a or c or g or t.
VMEMGDYVVVLEAPIIVKDVETSEDAINVAVSKVTKALNKEKLDFVRVEIGYSQCPVCGAHFESAFVIGSVGLVGMYLTLKVYNAQSIEHAERIAKAVVGKALKKVPLKVFEIRELEHDGENGIEAEELNGEDV

SEQ ID NO: 2000 - protein, 419 aa, Thermococcus kodakaraensis KOD1
  misc_feature (321437)..(321437): n is a or c or g or t.
  misc_feature (52783)..(527833): n is a or c or g or t.
  misc_feature (527901)..(527901): n is a or c or g or t.
  misc_feature (527978)..(527978): n is a or c or g or t.
  misc_feature (960838)..(960839): n is a or c or g or t.
  misc_feature (960860)..(960861): n is a or c or g or t.
  misc_feature (960872)..(960873): n is a or c or g or t.
  misc_feature (960879)..(960879): n is a or c or g or t.
  misc_feature (960890)..(960890): n is a or c or g or t.
  misc_feature (1250239)..(1250239): n is a or c or g or t.
  misc_feature (1302432)..(1302434): n is a or c or g or t.
  misc_feature (1302471)..(1302471): n is a or c or g or t.
  misc_feature (1302488)..(1302488): n is a or c or g or t.
  misc_feature (1674836)..(1674836): n is a or c or g or t.
MKGVILAAGKGERLRPLTDDRPKVVLKVANRPIIEYVLENLDPFVDEFVIIVRYQKEKLIEVLGDEFNGKPITYVEQLPGDGTAKAIESAREHVGDEEFIVANGDIYFEEEGVRELVAVFRREKADAALLVKHFEDLSHFGKIEVEGSLVKRVTEKPGKVPGYANLGVYIFKPEVFGFIERTPLSERGEYEITDTINLMIEAGKKVAYAAYSGYWNDIGRPWNLLELNEYLLKTKLKHEVRGTVEEGAVLIPPVEIGEGTVIRSGAYIIGPVKIGKNSRIGPNCFIRPYTSIGDNCHVGNAVEVKNSIIMDNSNAPHLNYVGDSIIGENCNLGAGTITANLRHDRGNIKVEIKGKLEDSGRHKLGAIIGHNVKTGINVTIYPGRKIGSGSLIGPGVIVDKNVPPRTLVVVKQEKVVKEL

SEQ ID NO: 2001 - protein, 279 aa, Thermococcus kodakaraensis KOD1
  misc_feature (321437)..(321437): n is a or c or g or t.
  misc_feature (52783)..(527833): n is a or c or g or t.
  misc_feature (527901)..(527901): n is a or c or g or t.
  misc_feature (527978)..(527978): n is a or c or g or t.
  misc_feature (960838)..(960839): n is a or c or g or t.
  misc_feature (960860)..(960861): n is a or c or g or t.
  misc_feature (960872)..(960873): n is a or c or g or t.
  misc_feature (960879)..(960879): n is a or c or g or t.
  misc_feature (960890)..(960890): n is a or c or g or t.
  misc_feature (1250239)..(1250239): n is a or c or g or t.
  misc_feature (1302432)..(1302434): n is a or c or g or t.
  misc_feature (1302471)..(1302471): n is a or c or g or t.
  misc_feature (1302488)..(1302488): n is a or c or g or t.
  misc_feature (1674836)..(1674836): n is a or c or g or t.
VNVLEVRNLRFQYPRSKKPALNGVNLSVRRGEMVGIIGPSGSGKSTLVLTFNGVIPHSIRGDFSGEVLVRNPSTGEELRTLETPVSKLSTVVGLVLQNPESQLFNMTVEDEVAFALENLGLPREEIEERVSWALRVVGLEGKREEFPPNLSGGEKQRLGIASVLGMKTTIIVMDETTSQVDPGGKKEVENVILRLRKEGVTVIIVEHDYRFLFRNADRIVVLKDGRVFLEGTPREVARRVGELLGLGIKLPHSLILSHRLGLPPLLSPEEFQPRVTHQR

SEQ ID NO: 2002 - protein, 198 aa, Thermococcus kodakaraensis KOD1
  misc_feature (321437)..(321437): n is a or c or g or t.
  misc_feature (52783)..(527833): n is a or c or g or t.
  misc_feature (527901)..(527901): n is a or c or g or t.
  misc_feature (527978)..(527978): n is a or c or g or t.
  misc_feature (960838)..(960839): n is a or c or g or t.
  misc_feature (960860)..(960861): n is a or c or g or t.
  misc_feature (960872)..(960873): n is a or c or g or t.
  misc_feature (960879)..(960879): n is a or c or g or t.
  misc_feature (960890)..(960890): n is a or c or g or t.
  misc_feature (1250239)..(1250239): n is a or c or g or t.
  misc_feature (1302432)..(1302434): n is a or c or g or t.
  misc_feature (1302471)..(1302471): n is a or c or g or t.
  misc_feature (1302488)..(1302488): n is a or c or g or t.
  misc_feature (1674836)..(1674836): n is a or c or g or t.
MDEKKTVKNGDLVLPGDYLGVIEEFLPGDGVREENGELYATRAGKVRIDSDKMEISVEPVTDVPPLPRVGDVVIGRVVEVKPQAVIVQIISIEGRENDREIATSKLAGIHISEIKEGFVEDITKEFKIGDVIRARVIANEKSPIQLSTKGPDLGVVYALCSRCRTPLIRRGDKLICPRCGNVETRKLSSLYRKLKVSL

SEQ ID NO: 2003 - protein, 97 aa, Thermococcus kodakaraensis KOD1
  misc_feature (321437)..(321437): n is a or c or g or t.
  misc_feature (52783)..(527833): n is a or c or g or t.
  misc_feature (527901)..(527901): n is a or c or g or t.
  misc_feature (527978)..(527978): n is a or c or g or t.
  misc_feature (960838)..(960839): n is a or c or g or t.
  misc_feature (960860)..(960861): n is a or c or g or t.
  misc_feature (960872)..(960873): n is a or c or g or t.
  misc_feature (960879)..(960879): n is a or c or g or t.
  misc_feature (960890)..(960890): n is a or c or g or t.
  misc_feature (1250239)..(1250239): n is a or c or g or t.
  misc_feature (1302432)..(1302434): n is a or c or g or t.
  misc_feature (1302471)..(1302471): n is a or c or g or t.
  misc_feature (1302488)..(1302488): n is a or c or g or t.
  misc_feature (1674836)..(1674836): n is a or c or g or t.
VMRMRIEVIRREENLLEFYLEGEDHTFANLLTETLHENEHVTFAGYTIEHPITMARKPRFKVVTDGKITPEKALEEAAQKIFDRAREVLEAWKAAIE

SEQ ID NO: 2004 - protein, 49 aa, Thermococcus kodakaraensis KOD1
  misc_feature (321437)..(321437): n is a or c or g or t.
  misc_feature (52783)..(527833): n is a or c or g or t.
  misc_feature (527901)..(527901): n is a or c or g or t.
  misc_feature (527978)..(527978): n is a or c or g or t.
  misc_feature (960838)..(960839): n is a or c or g or t.
  misc_feature (960860)..(960861): n is a or c or g or t.
  misc_feature (960872)..(960873): n is a or c or g or t.
  misc_feature (960879)..(960879): n is a or c or g or t.
  misc_feature (960890)..(960890): n is a or c or g or t.
  misc_feature (1250239)..(1250239): n is a or c or g or t.
  misc_feature (1302432)..(1302434): n is a or c or g or t.
  misc_feature (1302471)..(1302471): n is a or c or g or t.
  misc_feature (1302488)..(1302488): n is a or c or g or t.
  misc_feature (1674836)..(1674836): n is a or c or g or t.
MLARIVYYRTDSLPEEVIVVTNDPGKAEEIARKKMRDFRAVDYEVEWVA

SEQ ID NO: 2005 - protein, 312 aa, Thermococcus kodakaraensis KOD1
  misc_feature (321437)..(321437): n is a or c or g or t.
  misc_feature (52783)..(527833): n is a or c or g or t.
  misc_feature (527901)..(527901): n is a or c or g or t.
  misc_feature (527978)..(527978): n is a or c or g or t.
  misc_feature (960838)..(960839): n is a or c or g or t.
  misc_feature (960860)..(960861): n is a or c or g or t.
  misc_feature (960872)..(960873): n is a or c or g or t.
  misc_feature (960879)..(960879): n is a or c or g or t.
  misc_feature (960890)..(960890): n is a or c or g or t.
  misc_feature (1250239)..(1250239): n is a or c or g or t.
  misc_feature (1302432)..(1302434): n is a or c or g or t.
  misc_feature (1302471)..(1302471): n is a or c or g or t.
  misc_feature (1302488)..(1302488): n is a or c or g or t.
  misc_feature (1674836)..(1674836): n is a or c or g or t.
MGTYVIETNKLTKFFGKRNVVYHLNLKVPKGVVYGFLGPNGAGKTTTIKMLTGALRPTYGEIRIFGLRMPNDRVEIMKRVGYMPEVPIAYEDMTIFEFLVYMGRLAGMKKEDAMEQAKELMEYAGIGKLAMNRIGELSSGQKQRASFAAALMGNPELLILDEPTANLDPLGRMEFIGKVIQLAKAGKTIFISSHIVSEVEKMCNYVGLINRGTMLAQGRVRELASIEEDDYDVLTSDNGKAMAFLREKPYIREAWEEEGILRVKVDPRFLDEFFLAFPKYLVENGIRLKLFRPHTSPLERILMEKFGVGEEV

SEQ ID NO: 2006 - protein, 255 aa, Thermococcus kodakaraensis KOD1
  misc_feature (321437)..(321437): n is a or c or g or t.
  misc_feature (52783)..(527833): n is a or c or g or t.
  misc_feature (527901)..(527901): n is a or c or g or t.
  misc_feature (527978)..(527978): n is a or c or g or t.
  misc_feature (960838)..(960839): n is a or c or g or t.
  misc_feature (960860)..(960861): n is a or c or g or t.
  misc_feature (960872)..(960873): n is a or c or g or t.
  misc_feature (960879)..(960879): n is a or c or g or t.
  misc_feature (960890)..(960890): n is a or c or g or t.
  misc_feature (1250239)..(1250239): n is a or c or g or t.
  misc_feature (1302432)..(1302434): n is a or c or g or t.
  misc_feature (1302471)..(1302471): n is a or c or g or t.
  misc_feature (1302488)..(1302488): n is a or c or g or t.
  misc_feature (1674836)..(1674836): n is a or c or g or t.
MEVKRLLRSRRLKLMTLLMFLPVVVYFFTHEEITEYSTRALRISFQVNFSTYLVNFWASVIGQLVVIILMSELLGSEIDKGTIRVLLTKPVRKSELVIGKFLGGLTGMLVVFGLPYLVMQIYMVLLYKQGFTGLRATFGDLLYSLEVTILLLGSLGAFAMALSVVLSRPLYASLASFGVIFVAQFILPQLPFFDDPERFTLNYQLGVLLRDRFTLHTGLDVYKGDPSTTLVFFASVMLLSLMLAILGLYRREYRG

SEQ ID NO: 2007 - protein, 562 aa, Thermococcus kodakaraensis KOD1
  misc_feature (321437)..(321437): n is a or c or g or t.
  misc_feature (52783)..(527833): n is a or c or g or t.
  misc_feature (527901)..(527901): n is a or c or g or t.
  misc_feature (527978)..(527978): n is a or c or g or t.
  misc_feature (960838)..(960839): n is a or c or g or t.
  misc_feature (960860)..(960861): n is a or c or g or t.
  misc_feature (960872)..(960873): n is a or c or g or t.
  misc_feature (960879)..(960879): n is a or c or g or t.
  misc_feature (960890)..(960890): n is a or c or g or t.
  misc_feature (1250239)..(1250239): n is a or c or g or t.
  misc_feature (1302432)..(1302434): n is a or c or g or t.
  misc_feature (1302471)..(1302471): n is a or c or g or t.
  misc_feature (1302488)..(1302488): n is a or c or g or t.
  misc_feature (1674836)..(1674836): n is a or c or g or t.
MTFDKEKLKKIREEEERWNETTVKKFLEKAPERKEKFMTDDGFEIKRLYTPADLGEDWDYLEKLGFPGEYPFTRGVYATMYRGRFWTMRQYAGFGTAEESNKRYKYLLSQGQTGLSVAFDLPTQMGYDSDHPMAEGEVGKVGVAIDSLWDMEILFDGIPLDKVSTSMTINATAANLLAMYILVAEKQGVPQNVLRGTVQNDILKEYIARGTYIFPPQPSMRLTTDIIMYCAENVPKWNSISISGYHIREAGANAVQEVAFTLADGIEYVKAVIERGMDVDKFAPRLSFFFNAHNNFLEEIAKFRAARRLWAYIMKEWFHAKNPRSMMLRFHTQTAGSTLTAQQPENNIVRVAIQALAAVLGGTQSLHTNSYDEALSLPTEKSVRIALRTQQIIAYESGVVDTVDPLGGAYYIEWLTDHIYEEALKYIEKIQKMGGMMRAIERGYIQKEIADSAYKYQKEVEEKKRIIVGVNEFVVDEPLDVEILKVDPSIRDKQIERLKKLRSTRDSKKVEESLDKLRKAAETEDENLMPYIIEAHRHLATLGEVTDVLREVWGEYRAPLIF

SEQ ID NO: 2008 - protein, 206 aa, Thermococcus kodakaraensis KOD1
  misc_feature (321437)..(321437): n is a or c or g or t.
  misc_feature (52783)..(527833): n is a or c or g or t.
  misc_feature (527901)..(527901): n is a or c or g or t.
  misc_feature (527978)..(527978): n is a or c or g or t.
  misc_feature (960838)..(960839): n is a or c or g or t.
  misc_feature (960860)..(960861): n is a or c or g or t.
  misc_feature (960872)..(960873): n is a or c or g or t.
  misc_feature (960879)..(960879): n is a or c or g or t.
  misc_feature (960890)..(960890): n is a or c or g or t.
  misc_feature (1250239)..(1250239): n is a or c or g or t.
  misc_feature (1302432)..(1302434): n is a or c or g or t.
  misc_feature (1302471)..(1302471): n is a or c or g or t.
  misc_feature (1302488)..(1302488): n is a or c or g or t.
  misc_feature (1674836)..(1674836): n is a or c or g or t.
VMGVKFKGKAFGNVVRIEFDILTLGELKIDDLRDFDVDSLKIELKPTSSGIKIIGIWEGPVEKAGEGIKKALEESYKLRERVLNRIKSKTEAIRSTMLQLGFKEDVEGYGNAFRFTKKVGPYEIVVVASTTDDIVRVEVYGNDKKVLSPELESIFEDVEVEELEIYDFEDSKEERLVINLEIPKNEEKPERKIVEAIKMIENMLMA

SEQ ID NO: 2009 - protein, 412 aa, Thermococcus kodakaraensis KOD1
  misc_feature (321437)..(321437): n is a or c or g or t.
  misc_feature (52783)..(527833): n is a or c or g or t.
  misc_feature (527901)..(527901): n is a or c or g or t.
  misc_feature (527978)..(527978): n is a or c or g or t.
  misc_feature (960838)..(960839): n is a or c or g or t.
  misc_feature (960860)..(960861): n is a or c or g or t.
  misc_feature (960872)..(960873): n is a or c or g or t.
  misc_feature (960879)..(960879): n is a or c or g or t.
  misc_feature (960890)..(960890): n is a or c or g or t.
  misc_feature (1250239)..(1250239): n is a or c or g or t.
  misc_feature (1302432)..(1302434): n is a or c or g or t.
  misc_feature (1302471)..(1302471): n is a or c or g or t.
  misc_feature (1302488)..(1302488): n is a or c or g or t.
  misc_feature (1674836)..(1674836): n is a or c or g or t.
VMFRITDFTYEGKTVFLRADLNSPVEKGRITSDARFRAVLPTIQHLLDNGAKLVIATHQSRPYKGDYITTEEHAQILSRLLGQEVEYVEDIFGKYARERISSLKPGEAIILENLRFSAEEVFNRSIEECEKTFFVRKLAPLIDYVVNDAFATAHRSQPSLVGFARLKPMIMGKLMETEVDALSKAYESEERPRVYVLGGAKVDDSLRVAENVLRKGKADLILTGGLVGQIFTLAKGFDLGDANIEFLHRKGLLELVDWAEKILDEFYPYVRTPVDFAIDYKGERLEVDLLGGEKRLFDQYPILDIGSRTVEKYREILIGAKIIVANGPMGVFEREEFAVGTVGVFRAIGESPAFSVVGGGHSIASIYRYNITGISHISTGGGAMLSFFAGEELPVLKALKISYERFKDRVKE

SEQ ID NO: 2010 - protein, 246 aa, Thermococcus kodakaraensis KOD1
  misc_feature (321437)..(321437): n is a or c or g or t.
  misc_feature (52783)..(527833): n is a or c or g or t.
  misc_feature (527901)..(527901): n is a or c or g or t.
  misc_feature (527978)..(527978): n is a or c or g or t.
  misc_feature (960838)..(960839): n is a or c or g or t.
  misc_feature (960860)..(960861): n is a or c or g or t.
  misc_feature (960872)..(960873): n is a or c or g or t.
  misc_feature (960879)..(960879): n is a or c or g or t.
  misc_feature (960890)..(960890): n is a or c or g or t.
  misc_feature (1250239)..(1250239): n is a or c or g or t.
  misc_feature (1302432)..(1302434): n is a or c or g or t.
  misc_feature (1302471)..(1302471): n is a or c or g or t.
  misc_feature (1302488)..(1302488): n is a or c or g or t.
  misc_feature (1674836)..(1674836): n is a or c or g or t.
MEAKSRSLSLEGFTFEESWEEKKKRAEKIVEILMKTHPREKLLIGDPYRTLVHCIISQRMRDEVTYRVWEELFKKYKDIETIANTPVEEMQEFLRKQGVGLWKTKGEWIVKASKIILERYGGKVPDDIHELMKLPGIGRKCANIVLAYGFGKQAIPVDTHVNRISKRLGLAPPRVAPEKVEEYLTALIPKEKWIYVNHAMVDHGRSICRPINPKCEECPLREFCPYAKGLVTDEDIKGNARKPTRR

SEQ ID NO: 2011 - protein, 324 aa, Thermococcus kodakaraensis KOD1
  misc_feature (321437)..(321437): n is a or c or g or t.
  misc_feature (52783)..(527833): n is a or c or g or t.
  misc_feature (527901)..(527901): n is a or c or g or t.
  misc_feature (527978)..(527978): n is a or c or g or t.
  misc_feature (960838)..(960839): n is a or c or g or t.
  misc_feature (960860)..(960861): n is a or c or g or t.
  misc_feature (960872)..(960873): n is a or c or g or t.
  misc_feature (960879)..(960879): n is a or c or g or t.
  misc_feature (960890)..(960890): n is a or c or g or t.
  misc_feature (1250239)..(1250239): n is a or c or g or t.
  misc_feature (1302432)..(1302434): n is a or c or g or t.
  misc_feature (1302471)..(1302471): n is a or c or g or t.
  misc_feature (1302488)..(1302488): n is a or c or g or t.
  misc_feature (1674836)..(1674836): n is a or c or g or t.
MTYWTSEDNVAGKPGTALFIILPTIGCYRYRIGQACYMCSYPTAAPKVKWTQEAIVNYVKEALEKIEGTEGPFAVRMFTSGSFLDNGELKPETRRKIFEILAEMDNVEEIVIESRSELVRYEAVKELAEIVPDKHFEVAIGLETANDDVADVSINKGNTFADFVKAAEITHKAGAKVKTYLLLKPIFLSERDGVEDAKESIIKAEPYTDTFSINITDIQKGTLYERLWEKKEYRPPWLWSAVEVLIWAKRKFPNKRILSDPVGAGSKRGPHNCLTDYDRVIGKAIKKFSATQDLSYIENLKPECRDRWEYIVENGLLDWQLVTW

SEQ ID NO: 2012 - protein, 346 aa, Thermococcus kodakaraensis KOD1
  misc_feature (321437)..(321437): n is a or c or g or t.
  misc_feature (52783)..(527833): n is a or c or g or t.
  misc_feature (527901)..(527901): n is a or c or g or t.
  misc_feature (527978)..(527978): n is a or c or g or t.
  misc_feature (960838)..(960839): n is a or c or g or t.
  misc_feature (960860)..(960861): n is a or c or g or t.
  misc_feature (960872)..(960873): n is a or c or g or t.
  misc_feature (960879)..(960879): n is a or c or g or t.
  misc_feature (960890)..(960890): n is a or c or g or t.
  misc_feature (1250239)..(1250239): n is a or c or g or t.
  misc_feature (1302432)..(1302434): n is a or c or g or t.
  misc_feature (1302471)..(1302471): n is a or c or g or t.
  misc_feature (1302488)..(1302488): n is a or c or g or t.
  misc_feature (1674836)..(1674836): n is a or c or g or t.
MALRLRHDGGAGRAGEENLRSRDEHGTALPPRQGRSEWEGRGRTDKQDRRRGSHSNGDSREGGGMMYLKSAYEIREKYLRKDMLPTIFCPGCGIGSVLQFTLRAIDDLGLNQDEIVWVSGIGCSSRVPGFVNFDGLHTTHGRALAFATGIKLTNPDLKIIAFMGDGDAAAIGGNHLIHAIRRNLDVTVILINNFTYGMTGGQVAPTALKGLKGTTAPYGQFENPFDIAQLAVSAGANYVARWTVFNYLQGINSIKKALQKEGFTLVEFLSPCPISFGRRNRMKTAPELIRWYQKITVPLAKAKKMSPEELEGKIVIGEFADRDRPGLVREYREYIKRAKKMMGWEE

SEQ ID NO: 2013 - protein, 314 aa, Thermococcus kodakaraensis KOD1
  misc_feature (321437)..(321437): n is a or c or g or t.
  misc_feature (52783)..(527833): n is a or c or g or t.
  misc_feature (527901)..(527901): n is a or c or g or t.
  misc_feature (527978)..(527978): n is a or c or g or t.
  misc_feature (960838)..(960839): n is a or c or g or t.
  misc_feature (960860)..(960861): n is a or c or g or t.
  misc_feature (960872)..(960873): n is a or c or g or t.
  misc_feature (960879)..(960879): n is a or c or g or t.
  misc_feature (960890)..(960890): n is a or c or g or t.
  misc_feature (1250239)..(1250239): n is a or c or g or t.
  misc_feature (1302432)..(1302434): n is a or c or g or t.
  misc_feature (1302471)..(1302471): n is a or c or g or t.
  misc_feature (1302488)..(1302488): n is a or c or g or t.
  misc_feature (1674836)..(1674836): n is a or c or g or t.
MLEVFFLGTGGIMPTRERNVPAIALRYKGEIILFDAGEGTIRQMNTAKLSPMKVDKIFITHFHGDHYLGIPALIQTMNLWDRQKPLHIYGPKYTFQFVQNLLNSGFFRPGFDIHVHELGETRLKFGDYEIWSFKVEHGIPALGYVFKEKDRRGKFLKEKLREYGLEEGPILGKLEREGKIEWNGRIIRLEDVTGPRRKGLKIVYTGDTEPCERVKLFSERADLLIHEATYLNPGDRGDSYHSTVEEACDTARRAKVKLLALFHRAFRYSYEDYVEEALKICESLGVRAVVPRDFDVITFKSGTWELRNLLEERE

SEQ ID NO: 2014 - protein, 60 aa, Thermococcus kodakaraensis KOD1
  misc_feature (321437)..(321437): n is a or c or g or t.
  misc_feature (52783)..(527833): n is a or c or g or t.
  misc_feature (527901)..(527901): n is a or c or g or t.
  misc_feature (527978)..(527978): n is a or c or g or t.
  misc_feature (960838)..(960839): n is a or c or g or t.
  misc_feature (960860)..(960861): n is a or c or g or t.
  misc_feature (960872)..(960873): n is a or c or g or t.
  misc_feature (960879)..(960879): n is a or c or g or t.
  misc_feature (960890)..(960890): n is a or c or g or t.
  misc_feature (1250239)..(1250239): n is a or c or g or t.
  misc_feature (1302432)..(1302434): n is a or c or g or t.
  misc_feature (1302471)..(1302471): n is a or c or g or t.
  misc_feature (1302488)..(1302488): n is a or c or g or t.
  misc_feature (1674836)..(1674836): n is a or c or g or t.
MKERLEKMLNVEIIRIEEADDKIVVYVPADKVRIAVGSGGAAVKAAELVIGKKIEVRPAE

SEQ ID NO: 2015 - protein, 52 aa, Thermococcus kodakaraensis KOD1
  misc_feature (321437)..(321437): n is a or c or g or t.
  misc_feature (52783)..(527833): n is a or c or g or t.
  misc_feature (527901)..(527901): n is a or c or g or t.
  misc_feature (527978)..(527978): n is a or c or g or t.
  misc_feature (960838)..(960839): n is a or c or g or t.
  misc_feature (960860)..(960861): n is a or c or g or t.
  misc_feature (960872)..(960873): n is a or c or g or t.
  misc_feature (960879)..(960879): n is a or c or g or t.
  misc_feature (960890)..(960890): n is a or c or g or t.
  misc_feature (1250239)..(1250239): n is a or c or g or t.
  misc_feature (1302432)..(1302434): n is a or c or g or t.
  misc_feature (1302471)..(1302471): n is a or c or g or t.
  misc_feature (1302488)..(1302488): n is a or c or g or t.
  misc_feature (1674836)..(1674836): n is a or c or g or t.
VVSSGDVGLYYRFKNKKHLDAPWGRLTMGEPVEIIVFSKEKKKGFRLVKEAP

SEQ ID NO: 2016 - protein, 231 aa, Thermococcus kodakaraensis KOD1
  misc_feature (321437)..(321437): n is a or c or g or t.
  misc_feature (52783)..(527833): n is a or c or g or t.
  misc_feature (527901)..(527901): n is a or c or g or t.
  misc_feature (527978)..(527978): n is a or c or g or t.
  misc_feature (960838)..(960839): n is a or c or g or t.
  misc_feature (960860)..(960861): n is a or c or g or t.
  misc_feature (960872)..(960873): n is a or c or g or t.
  misc_feature (960879)..(960879): n is a or c or g or t.
  misc_feature (960890)..(960890): n is a or c or g or t.
  misc_feature (1250239)..(1250239): n is a or c or g or t.
  misc_feature (1302432)..(1302434): n is a or c or g or t.
  misc_feature (1302471)..(1302471): n is a or c or g or t.
  misc_feature (1302488)..(1302488): n is a or c or g or t.
  misc_feature (1674836)..(1674836): n is a or c or g or t.
MEVFGMGLISDADKKVIKEEFFSKMTNPVKLIVFVGKEHCQYCDQLKQLVQELSELTDKLSYEVVDFDTEEGKKLAEQYRIDRAPATTITQDGKDMGVRYFGLPAGHEFGAFLEDIVDVSNGTTDLAPDTKEAIHGVDKDVRILVFVTPTCPYCPLAVRMAHKFAIENTLAGKGKILGDMVEAIEYPEWADQYSVMAVPKIVIQVDGEDKVQFEGAYPEKMFLEKLLAALE

SEQ ID NO: 2017 - protein, 82 aa, Thermococcus kodakaraensis KOD1
  misc_feature (321437)..(321437): n is a or c or g or t.
  misc_feature (52783)..(527833): n is a or c or g or t.
  misc_feature (527901)..(527901): n is a or c or g or t.
  misc_feature (527978)..(527978): n is a or c or g or t.
  misc_feature (960838)..(960839): n is a or c or g or t.
  misc_feature (960860)..(960861): n is a or c or g or t.
  misc_feature (960872)..(960873): n is a or c or g or t.
  misc_feature (960879)..(960879): n is a or c or g or t.
  misc_feature (960890)..(960890): n is a or c or g or t.
  misc_feature (1250239)..(1250239): n is a or c or g or t.
  misc_feature (1302432)..(1302434): n is a or c or g or t.
  misc_feature (1302471)..(1302471): n is a or c or g or t.
  misc_feature (1302488)..(1302488): n is a or c or g or t.
  misc_feature (1674836)..(1674836): n is a or c or g or t.
VAAKKEFNIFDHVLVPEHRILSEEEKEELLKKYRIRISQLPQIKASDPAVVALGAKPGDVIEIKRKSPTAGYYYYYRLVVED

SEQ ID NO: 2018 - protein, 394 aa, Thermococcus kodakaraensis KOD1
  misc_feature (321437)..(321437): n is a or c or g or t.
  misc_feature (52783)..(527833): n is a or c or g or t.
  misc_feature (527901)..(527901): n is a or c or g or t.
  misc_feature (527978)..(527978): n is a or c or g or t.
  misc_feature (960838)..(960839): n is a or c or g or t.
  misc_feature (960860)..(960861): n is a or c or g or t.
  misc_feature (960872)..(960873): n is a or c or g or t.
  misc_feature (960879)..(960879): n is a or c or g or t.
  misc_feature (960890)..(960890): n is a or c or g or t.
  misc_feature (1250239)..(1250239): n is a or c or g or t.
  misc_feature (1302432)..(1302434): n is a or c or g or t.
  misc_feature (1302471)..(1302471): n is a or c or g or t.
  misc_feature (1302488)..(1302488): n is a or c or g or t.
  misc_feature (1674836)..(1674836): n is a or c or g or t.
VSEMVAEKTIKSMVSKAELPDNIKEELYAKLIEYNEKYKLKKDEIQAIIDETVREYQKALIEPGEAVGTVAAQSIGEPSTQMTLNTFHYAGVAEINVTLGLPRIIEIVDARKNPSTPIMTVYLDEEHRYDRDKALEVARRIEGTTLENLAREETIDILNMEYVVEIDPERLEKAGLDMEKVVRKLTGSFKSAEFEAEGYTLVVRPKKVTKLSDLRKIAEKVKKHRLKGLSGVGKTIIRKEGDEYVIYTEGSNFKQVLKVPGVDPTRTRTNNIWEIAEVLGIEAARNAIIDEIVSTMREQGLEVDVRHIMLVADMMTLDGVIRPIGRHGIVGEKASVLARAAFEITTQHLFAAAERGEVDPLNGVVENVLIGQPVPVGTGIVKLAMSLPLRPKRE

SEQ ID NO: 2019 - protein, 146 aa, Thermococcus kodakaraensis KOD1
  misc_feature (321437)..(321437): n is a or c or g or t.
  misc_feature (52783)..(527833): n is a or c or g or t.
  misc_feature (527901)..(527901): n is a or c or g or t.
  misc_feature (527978)..(527978): n is a or c or g or t.
  misc_feature (960838)..(960839): n is a or c or g or t.
  misc_feature (960860)..(960861): n is a or c or g or t.
  misc_feature (960872)..(960873): n is a or c or g or t.
  misc_feature (960879)..(960879): n is a or c or g or t.
  misc_feature (960890)..(960890): n is a or c or g or t.
  misc_feature (1250239)..(1250239): n is a or c or g or t.
  misc_feature (1302432)..(1302434): n is a or c or g or t.
  misc_feature (1302471)..(1302471): n is a or c or g or t.
  misc_feature (1302488)..(1302488): n is a or c or g or t.
  misc_feature (1674836)..(1674836): n is a or c or g or t.
VMPLKLNTDQIKYIALFESMTGATVLDCLIDTNRNRLIYVIKKGEMGLALGKKGANVKRVQGMLGKEIELIEHSENPEEFLRNIYKSLGVKVKKVHITEKRDGKKVALLDVGPRDKPRAIGRGGQNINLVKELMERHHGIEDVVII

SEQ ID NO: 2020 - protein, 215 aa, Thermococcus kodakaraensis KOD1
  misc_feature (321437)..(321437): n is a or c or g or t.
  misc_feature (52783)..(527833): n is a or c or g or t.
  misc_feature (527901)..(527901): n is a or c or g or t.
  misc_feature (527978)..(527978): n is a or c or g or t.
  misc_feature (960838)..(960839): n is a or c or g or t.
  misc_feature (960860)..(960861): n is a or c or g or t.
  misc_feature (960872)..(960873): n is a or c or g or t.
  misc_feature (960879)..(960879): n is a or c or g or t.
  misc_feature (960890)..(960890): n is a or c or g or t.
  misc_feature (1250239)..(1250239): n is a or c or g or t.
  misc_feature (1302432)..(1302434): n is a or c or g or t.
  misc_feature (1302471)..(1302471): n is a or c or g or t.
  misc_feature (1302488)..(1302488): n is a or c or g or t.
  misc_feature (1674836)..(1674836): n is a or c or g or t.
MAKPLTERFFIPKEVKVMGRWSVEDVTVEDPSLKPYINLDARILPHSHGRYAKKPFGKANVHIVERLINKVMRSGASHYKAGGHFMRREHRSIMSKKMKAYEVVKEAFMIIERRTKQNPIQVLVKAIENSAPREDTTTIAFGGIRYHMSVDVSPLRRLDIALKNIALGASIKCYRNKTTYAQALAEEIIAAANKDPKSFAYSKKEEIERIAQSSR

SEQ ID NO: 2021 - protein, 130 aa, Thermococcus kodakaraensis KOD1
  misc_feature (321437)..(321437): n is a or c or g or t.
  misc_feature (52783)..(527833): n is a or c or g or t.
  misc_feature (527901)..(527901): n is a or c or g or t.
  misc_feature (527978)..(527978): n is a or c or g or t.
  misc_feature (960838)..(960839): n is a or c or g or t.
  misc_feature (960860)..(960861): n is a or c or g or t.
  misc_feature (960872)..(960873): n is a or c or g or t.
  misc_feature (960879)..(960879): n is a or c or g or t.
  misc_feature (960890)..(960890): n is a or c or g or t.
  misc_feature (1250239)..(1250239): n is a or c or g or t.
  misc_feature (1302432)..(1302434): n is a or c or g or t.
  misc_feature (1302471)..(1302471): n is a or c or g or t.
  misc_feature (1302488)..(1302488): n is a or c or g or t.
  misc_feature (1674836)..(1674836): n is a or c or g or t.
MIFLIGFSEDEVNLIRETFNGVPVYEIPSYCRDWVLKEIVEKADSLKGSGNWHERKFFLMHDLSNDEVREALGKMKSLGFKGVIYATTTPTSLTMKLDELIEEWLEEDAYFRQLRRMKRGPYLDIGGGTG

SEQ ID NO: 2022 - protein, 383 aa, Thermococcus kodakaraensis KOD1
  misc_feature (321437)..(321437): n is a or c or g or t.
  misc_feature (52783)..(527833): n is a or c or g or t.
  misc_feature (527901)..(527901): n is a or c or g or t.
  misc_feature (527978)..(527978): n is a or c or g or t.
  misc_feature (960838)..(960839): n is a or c or g or t.
  misc_feature (960860)..(960861): n is a or c or g or t.
  misc_feature (960872)..(960873): n is a or c or g or t.
  misc_feature (960879)..(960879): n is a or c or g or t.
  misc_feature (960890)..(960890): n is a or c or g or t.
  misc_feature (1250239)..(1250239): n is a or c or g or t.
  misc_feature (1302432)..(1302434): n is a or c or g or t.
  misc_feature (1302471)..(1302471): n is a or c or g or t.
  misc_feature (1302488)..(1302488): n is a or c or g or t.
  misc_feature (1674836)..(1674836): n is a or c or g or t.
VAIKFAPNKEYTFTLWDGKVIVKPKLDMKYLYVEITSRCNLKCEMCFKQYWEDTEGDMDWNLFLKILDDAEAFPELRMIYFGGIGEPTVHPRFMDMVREVKRRGFALGISTNGTLLTDEMMREFAKLGVDLIYFSMDTVPTAQNAITLGHITSAVTADKIRKLVRYREEYGTHRPSIGVEVVVTKENYQQLPEMAKFLLDMKVDAMLVSNLLPLTPEQVDDIVYDGSVDMTPILDELYKIAHNGLYIKLPKFELRTERQCDFDENNVAVVRWDGEVAPCYRFLHTYKEYIFGREKKVNAYSFGNVKEQSLADIWTSEKYTWFRFTMKNYMYPSCTDCDLREACDFVKTTDIDCWGNEPSCADCLWSRRIVQCPIPQYMFGKFF

SEQ ID NO: 2023 - protein, 232 aa, Thermococcus kodakaraensis KOD1
  misc_feature (321437)..(321437): n is a or c or g or t.
  misc_feature (52783)..(527833): n is a or c or g or t.
  misc_feature (527901)..(527901): n is a or c or g or t.
  misc_feature (527978)..(527978): n is a or c or g or t.
  misc_feature (960838)..(960839): n is a or c or g or t.
  misc_feature (960860)..(960861): n is a or c or g or t.
  misc_feature (960872)..(960873): n is a or c or g or t.
  misc_feature (960879)..(960879): n is a or c or g or t.
  misc_feature (960890)..(960890): n is a or c or g or t.
  misc_feature (1250239)..(1250239): n is a or c or g or t.
  misc_feature (1302432)..(1302434): n is a or c or g or t.
  misc_feature (1302471)..(1302471): n is a or c or g or t.
  misc_feature (1302488)..(1302488): n is a or c or g or t.
  misc_feature (1674836)..(1674836): n is a or c or g or t.
MITARISTGIPGLDIMLNGGLIPGRTYLVKGAPGTGKTTLAMHFAMAGISNGESVLYITLEEPGENIKQDFSRMGFDVYNENFTLIDATPTTEHYVLVEDFFESFAKNLNKLTDAIKEQFKTKRYSRVVVDPITMLKFTSSDELEYRKAFLSFIKTMMRLRTTVLITAEGEQADIEEYLVNGVIELELFQKEGRLERALKITKFRGSGFDNVIRPYEITENGMVVYPDKSAL

SEQ ID NO: 2024 - protein, 150 aa, Thermococcus kodakaraensis KOD1
  misc_feature (321437)..(321437): n is a or c or g or t.
  misc_feature (52783)..(527833): n is a or c or g or t.
  misc_feature (527901)..(527901): n is a or c or g or t.
  misc_feature (527978)..(527978): n is a or c or g or t.
  misc_feature (960838)..(960839): n is a or c or g or t.
  misc_feature (960860)..(960861): n is a or c or g or t.
  misc_feature (960872)..(960873): n is a or c or g or t.
  misc_feature (960879)..(960879): n is a or c or g or t.
  misc_feature (960890)..(960890): n is a or c or g or t.
  misc_feature (1250239)..(1250239): n is a or c or g or t.
  misc_feature (1302432)..(1302434): n is a or c or g or t.
  misc_feature (1302471)..(1302471): n is a or c or g or t.
  misc_feature (1302488)..(1302488): n is a or c or g or t.
  misc_feature (1674836)..(1674836): n is a or c or g or t.
MSITTKTGDKGLTGLFTGDRVAKFSPIMEANGTIDELDSFIGEAKHYVPEEMAETLERIQVQLYDLMAELASKGKYSKVSEEDVKWLEGFIHKYEEEVQLKSFVLPGSTIASAKLDVCRAIARRAERRVAKLVLDYGFGQNALVYLNKAQ

SEQ ID NO: 2025 - protein, 432 aa, Thermococcus kodakaraensis KOD1
  misc_feature (321437)..(321437): n is a or c or g or t.
  misc_feature (52783)..(527833): n is a or c or g or t.
  misc_feature (527901)..(527901): n is a or c or g or t.
  misc_feature (527978)..(527978): n is a or c or g or t.
  misc_feature (960838)..(960839): n is a or c or g or t.
  misc_feature (960860)..(960861): n is a or c or g or t.
  misc_feature (960872)..(960873): n is a or c or g or t.
  misc_feature (960879)..(960879): n is a or c or g or t.
  misc_feature (960890)..(960890): n is a or c or g or t.
  misc_feature (1250239)..(1250239): n is a or c or g or t.
  misc_feature (1302432)..(1302434): n is a or c or g or t.
  misc_feature (1302471)..(1302471): n is a or c or g or t.
  misc_feature (1302488)..(1302488): n is a or c or g or t.
  misc_feature (1674836)..(1674836): n is a or c or g or t.
MRVVLIDGEHYPDVTKWAIHKLGDVCCAVFLGGTEKIGSLKALEDKIGVPLYHSPNYLDALKRAVLENDVEEVVDLSDEPVLTYEDRFRIASLCMLLGVTYRGADFTFTPKPLKKTKKPSISIIGTGKRVGKTAVSGFVARTLKEVARPVVVTMGRGGPEEPELIEGEKIELTPQFLLKVAKEGKHAASDHFEDALTSRVTTIGCRRCGGGMAGFPFFDVVDKGVELAESLPHDLIILEGSGATFPAYRTDAYILIIGGRQKTDFLRGYFGPFRIALADLIIVTMSDEINPEKRAEIRKIVEEINPKADLHFTAFRPRPLGNISGKKLGLVMTSQSALPKAKEHLEGLGAEVVATSGNLSNRPKLREDLEKFRGIDAVAVELKAAAVDVVTKWALERGIEVIYLDNEPVNIDGKDLRKSVLELGKRVLGRRA

SEQ ID NO: 2026 - protein, 142 aa, Thermococcus kodakaraensis KOD1
  misc_feature (321437)..(321437): n is a or c or g or t.
  misc_feature (52783)..(527833): n is a or c or g or t.
  misc_feature (527901)..(527901): n is a or c or g or t.
  misc_feature (527978)..(527978): n is a or c or g or t.
  misc_feature (960838)..(960839): n is a or c or g or t.
  misc_feature (960860)..(960861): n is a or c or g or t.
  misc_feature (960872)..(960873): n is a or c or g or t.
  misc_feature (960879)..(960879): n is a or c or g or t.
  misc_feature (960890)..(960890): n is a or c or g or t.
  misc_feature (1250239)..(1250239): n is a or c or g or t.
  misc_feature (1302432)..(1302434): n is a or c or g or t.
  misc_feature (1302471)..(1302471): n is a or c or g or t.
  misc_feature (1302488)..(1302488): n is a or c or g or t.
  misc_feature (1674836)..(1674836): n is a or c or g or t.
MKGSYFLVILLENDKVIRTKAREFPLKAGYYVYVGSAMNSLEKRVERHFREDKKLHWHIDYLLKEAELLRAYLIPSEERLEERLSLEVSKFGEPVEGFGAGDVRVSTNLYRFEEEPDKILVGVLTRLGLSWKTVKSAEEILE

SEQ ID NO: 2027 - protein, 282 aa, Thermococcus kodakaraensis KOD1
  misc_feature (321437)..(321437): n is a or c or g or t.
  misc_feature (52783)..(527833): n is a or c or g or t.
  misc_feature (527901)..(527901): n is a or c or g or t.
  misc_feature (527978)..(527978): n is a or c or g or t.
  misc_feature (960838)..(960839): n is a or c or g or t.
  misc_feature (960860)..(960861): n is a or c or g or t.
  misc_feature (960872)..(960873): n is a or c or g or t.
  misc_feature (960879)..(960879): n is a or c or g or t.
  misc_feature (960890)..(960890): n is a or c or g or t.
  misc_feature (1250239)..(1250239): n is a or c or g or t.
  misc_feature (1302432)..(1302434): n is a or c or g or t.
  misc_feature (1302471)..(1302471): n is a or c or g or t.
  misc_feature (1302488)..(1302488): n is a or c or g or t.
  misc_feature (1674836)..(1674836): n is a or c or g or t.
VVPMRAFISLDLEGLPHVVSPEHLSVKKALYGEARKIATEVVKITAMTLHELGFEEVVVADSHGPMVNIIPEEMPGFVKLVRGFPRPMSMVAGSKGSDVALFLGYHARSGVGRATFDHTYSGSTIDWITVNGRPVSETLLNAYLLGEWGVPVILVAGDRALLESDVRDALPKTVGVPLKESFSRYSAISPSMEAINKLLIKGTKEAVKRWKEGAIKPLSVEKPVKVGVRFLNSGFADAAELCPLVRRIDGKTVEFETNSVEEAYKMIELLIFAATGVRAVFG

SEQ ID NO: 2028 - protein, 37 aa, Thermococcus kodakaraensis KOD1
  misc_feature (321437)..(321437): n is a or c or g or t.
  misc_feature (52783)..(527833): n is a or c or g or t.
  misc_feature (527901)..(527901): n is a or c or g or t.
  misc_feature (527978)..(527978): n is a or c or g or t.
  misc_feature (960838)..(960839): n is a or c or g or t.
  misc_feature (960860)..(960861): n is a or c or g or t.
  misc_feature (960872)..(960873): n is a or c or g or t.
  misc_feature (960879)..(960879): n is a or c or g or t.
  misc_feature (960890)..(960890): n is a or c or g or t.
  misc_feature (1250239)..(1250239): n is a or c or g or t.
  misc_feature (1302432)..(1302434): n is a or c or g or t.
  misc_feature (1302471)..(1302471): n is a or c or g or t.
  misc_feature (1302488)..(1302488): n is a or c or g or t.
  misc_feature (1674836)..(1674836): n is a or c or g or t.
MFIRTTTVLIGLIGARIVCEFTVLYYLIIFYIIYWST

SEQ ID NO: 2029 - protein, 339 aa, Thermococcus kodakaraensis KOD1
  misc_feature (321437)..(321437): n is a or c or g or t.
  misc_feature (52783)..(527833): n is a or c or g or t.
  misc_feature (527901)..(527901): n is a or c or g or t.
  misc_feature (527978)..(527978): n is a or c or g or t.
  misc_feature (960838)..(960839): n is a or c or g or t.
  misc_feature (960860)..(960861): n is a or c or g or t.
  misc_feature (960872)..(960873): n is a or c or g or t.
  misc_feature (960879)..(960879): n is a or c or g or t.
  misc_feature (960890)..(960890): n is a or c or g or t.
  misc_feature (1250239)..(1250239): n is a or c or g or t.
  misc_feature (1302432)..(1302434): n is a or c or g or t.
  misc_feature (1302471)..(1302471): n is a or c or g or t.
  misc_feature (1302488)..(1302488): n is a or c or g or t.
  misc_feature (1674836)..(1674836): n is a or c or g or t.
MPSYIVVGGQWGDEGKGSVIAYLALKDEPEVIARGGVGTNAGHSVFINGKKYAVRQLPTGFMQTKARLLVGAGVLVDPEVFFHELEHLKDFNVRGRVGIDYRCAIIEEKHKQLDRSNHHLHEEIGTTGSGCGPANADRVMRRAKLAKDIKELEPYLTDVAAEVNDALDDGKLVLIEGTQGFGLSLYYGTYPYVTSKDTTASAIASDVGIGPTRVDDVIVVFKSFPTRVGAGPFPTEMPQEEAERLGLVEYGTVTGRRRRVGWFDFEFARYSARINGATMLALTMLDKYDGEAFGVTDYDKLPKRAKEFVEEIEERVGVPVGLIKTGPELEHVIDRRENI

SEQ ID NO: 2030 - protein, 53 aa, Thermococcus kodakaraensis KOD1
  misc_feature (321437)..(321437): n is a or c or g or t.
  misc_feature (52783)..(527833): n is a or c or g or t.
  misc_feature (527901)..(527901): n is a or c or g or t.
  misc_feature (527978)..(527978): n is a or c or g or t.
  misc_feature (960838)..(960839): n is a or c or g or t.
  misc_feature (960860)..(960861): n is a or c or g or t.
  misc_feature (960872)..(960873): n is a or c or g or t.
  misc_feature (960879)..(960879): n is a or c or g or t.
  misc_feature (960890)..(960890): n is a or c or g or t.
  misc_feature (1250239)..(1250239): n is a or c or g or t.
  misc_feature (1302432)..(1302434): n is a or c or g or t.
  misc_feature (1302471)..(1302471): n is a or c or g or t.
  misc_feature (1302488)..(1302488): n is a or c or g or t.
  misc_feature (1674836)..(1674836): n is a or c or g or t.
MLFPRALPEILAGGPYPYDRPLIVVWCILLTVVIFLSIALYKQKTREKAQGTG

SEQ ID NO: 2031 - protein, 37 aa, Thermococcus kodakaraensis KOD1
  misc_feature (321437)..(321437): n is a or c or g or t.
  misc_feature (52783)..(527833): n is a or c or g or t.
  misc_feature (527901)..(527901): n is a or c or g or t.
  misc_feature (527978)..(527978): n is a or c or g or t.
  misc_feature (960838)..(960839): n is a or c or g or t.
  misc_feature (960860)..(960861): n is a or c or g or t.
  misc_feature (960872)..(960873): n is a or c or g or t.
  misc_feature (960879)..(960879): n is a or c or g or t.
  misc_feature (960890)..(960890): n is a or c or g or t.
  misc_feature (1250239)..(1250239): n is a or c or g or t.
  misc_feature (1302432)..(1302434): n is a or c or g or t.
  misc_feature (1302471)..(1302471): n is a or c or g or t.
  misc_feature (1302488)..(1302488): n is a or c or g or t.
  misc_feature (1674836)..(1674836): n is a or c or g or t.
VYDALYIAQALKYGKLATSDEKQGKTAEKLGVEVTYL

SEQ ID NO: 2032 - protein, 36 aa, Thermococcus kodakaraensis KOD1
  misc_feature (321437)..(321437): n is a or c or g or t.
  misc_feature (52783)..(527833): n is a or c or g or t.
  misc_feature (527901)..(527901): n is a or c or g or t.
  misc_feature (527978)..(527978): n is a or c or g or t.
  misc_feature (960838)..(960839): n is a or c or g or t.
  misc_feature (960860)..(960861): n is a or c or g or t.
  misc_feature (960872)..(960873): n is a or c or g or t.
  misc_feature (960879)..(960879): n is a or c or g or t.
  misc_feature (960890)..(960890): n is a or c or g or t.
  misc_feature (1250239)..(1250239): n is a or c or g or t.
  misc_feature (1302432)..(1302434): n is a or c or g or t.
  misc_feature (1302471)..(1302471): n is a or c or g or t.
  misc_feature (1302488)..(1302488): n is a or c or g or t.
  misc_feature (1674836)..(1674836): n is a or c or g or t.
MDIPERRATIVPTTPRTLPASRIENGRAVKELDARK

SEQ ID NO: 2033 - protein, 663 aa, Thermococcus kodakaraensis KOD1
  misc_feature (167)..(167): The 'Xaa' at location 167 stands for Asp, Gly, Ala, or Val.
  misc_feature (321437)..(321437): n is a or c or g or t.
  misc_feature (52783)..(527833): n is a or c or g or t.
  misc_feature (527901)..(527901): n is a or c or g or t.
  misc_feature (527978)..(527978): n is a or c or g or t.
  misc_feature (960838)..(960839): n is a or c or g or t.
  misc_feature (960860)..(960861): n is a or c or g or t.
  misc_feature (960872)..(960873): n is a or c or g or t.
  misc_feature (960879)..(960879): n is a or c or g or t.
  misc_feature (960890)..(960890): n is a or c or g or t.
  misc_feature (1250239)..(1250239): n is a or c or g or t.
  misc_feature (1302432)..(1302434): n is a or c or g or t.
  misc_feature (1302471)..(1302471): n is a or c or g or t.
  misc_feature (1302488)..(1302488): n is a or c or g or t.
  misc_feature (1674836)..(1674836): n is a or c or g or t.
VVKMAMKVVALAGNPNVGKTTVFNSLTGMRQHVGNWPGVTVEKKEGVFEYKGEKFLVVDLPGTYSLTAHSIDELVARNFLLNGNPDVVVNVVDATSLLRNLLLTMEIFEMGLKNVVIALNKIDLAEKKGIRIDPIKMSKALGVPVVAMSAKEGIGVEELKEKIYEMXNGMVKTNPVVPRYDPEVEREIEHIIGCLKGTELEKRYPLRWLAIKLLQRDDEVMKLVLRHIGEEKLKEIMTHIGEAEARYGRAMDLIIASQKYEFIDRLTHEFMSYAGREGESLTDQLDRILIHPVYGFIALAIVFYGVFKFVFALGLPLQEWLDGLFASFGEWLAPHIANETLRGLVVDGVIGGVGSVLSFFPLVFLLFFALSVLEDVGYMARVAVLMEGIMRKFGLPGKAVIPLILGLGCNVPAVMATRTLEDERDRLVAMFVNPFIPCSARLSVISFLAGTFFSSNHALVALSVYLIAILVALLSAWFVSHFVVRGEESPFVIELPEYLIPSWKTVILHSWERSKEFVKKAGTVILLGSIFIWYLSNYPVELGSGKSYAETLGYLFEPYMMLMGLDWKAAVSLIFGIIAKENVISTYGVIYGTTEAIKNAMTPLQAYVLAVVTTLYIPCIATIGAIRAESNWKWALFTTAYMIAVASIVGILIWHVGIALGLS

SEQ ID NO: 2034 - protein, 88 aa, Thermococcus kodakaraensis KOD1
  misc_feature (321437)..(321437): n is a or c or g or t.
  misc_feature (52783)..(527833): n is a or c or g or t.
  misc_feature (527901)..(527901): n is a or c or g or t.
  misc_feature (527978)..(527978): n is a or c or g or t.
  misc_feature (960838)..(960839): n is a or c or g or t.
  misc_feature (960860)..(960861): n is a or c or g or t.
  misc_feature (960872)..(960873): n is a or c or g or t.
  misc_feature (960879)..(960879): n is a or c or g or t.
  misc_feature (960890)..(960890): n is a or c or g or t.
  misc_feature (1250239)..(1250239): n is a or c or g or t.
  misc_feature (1302432)..(1302434): n is a or c or g or t.
  misc_feature (1302471)..(1302471): n is a or c or g or t.
  misc_feature (1302488)..(1302488): n is a or c or g or t.
  misc_feature (1674836)..(1674836): n is a or c or g or t.
MGKLEDVLELIKAGVTNEREIAERLGLSSKEVEDIIKILESLGYVEKVEFGSKACETCPLKKVCYGSCLRPTGAKAFKLTEKAFSLER

SEQ ID NO: 2035 - protein, 489 aa, Thermococcus kodakaraensis KOD1
  misc_feature (321437)..(321437): n is a or c or g or t.
  misc_feature (52783)..(527833): n is a or c or g or t.
  misc_feature (527901)..(527901): n is a or c or g or t.
  misc_feature (527978)..(527978): n is a or c or g or t.
  misc_feature (960838)..(960839): n is a or c or g or t.
  misc_feature (960860)..(960861): n is a or c or g or t.
  misc_feature (960872)..(960873): n is a or c or g or t.
  misc_feature (960879)..(960879): n is a or c or g or t.
  misc_feature (960890)..(960890): n is a or c or g or t.
  misc_feature (1250239)..(1250239): n is a or c or g or t.
  misc_feature (1302432)..(1302434): n is a or c or g or t.
  misc_feature (1302471)..(1302471): n is a or c or g or t.
  misc_feature (1302488)..(1302488): n is a or c or g or t.
  misc_feature (1674836)..(1674836): n is a or c or g or t.
MPWVMLMCLIAGGMGGNLREKLIKMAIAGKHRGPESFGVWTDGGVLKSDDFSKLTEIPDGRIGLLQCRLAITGSKSFTQPFINDLALVHNGEIYNHAALREYLERRGVSFESDVDSEVVLRLIEFLREEHLSYPEIVKKLFWMLEGDYAVAFSDGERIYLFRDPLGIRPLYFSRNGLFASEKKVLWAVGEREVEPVQPGELVVLEKNGVRRARLFSLENLKSKAKCERKDPVGGVGKLLRYAVKNRVSKKTGVLFSGGLDSTLVAYLASQYSDVILYTAGTEDSPDIEWARKVADHFGWALRERTFEVEDVRDAVKRVMYAIEEPNPMNLAIGLPLYFASGLASSDGTRVLLSGQGADELFGGYAKYLERPELMEEDIALISERNLARDDKITMLNGVEGRYPFLALPVVSFALKLPLEAKIVDGTRKVILRKLALRLGIPEWIAEREKRAAQYGSRAQKLLEKIAREEGLTLREFAEKLFRETFPNAF

SEQ ID NO: 2036 - protein, 344 aa, Thermococcus kodakaraensis KOD1
  misc_feature (321437)..(321437): n is a or c or g or t.
  misc_feature (52783)..(527833): n is a or c or g or t.
  misc_feature (527901)..(527901): n is a or c or g or t.
  misc_feature (527978)..(527978): n is a or c or g or t.
  misc_feature (960838)..(960839): n is a or c or g or t.
  misc_feature (960860)..(960861): n is a or c or g or t.
  misc_feature (960872)..(960873): n is a or c or g or t.
  misc_feature (960879)..(960879): n is a or c or g or t.
  misc_feature (960890)..(960890): n is a or c or g or t.
  misc_feature (1250239)..(1250239): n is a or c or g or t.
  misc_feature (1302432)..(1302434): n is a or c or g or t.
  misc_feature (1302471)..(1302471): n is a or c or g or t.
  misc_feature (1302488)..(1302488): n is a or c or g or t.
  misc_feature (1674836)..(1674836): n is a or c or g or t.
MRILMVGHYPPHGGGVARHLDNLVRELRKRHEVHVLTYGPVKVREFEREFVHQLRVPPFYGLRGSTFAFAGARKIAQLHREFGFDIVHCHFAGTTSFSGALAKEKTGLPFVVTAHGSDLENTPKSPLGRFYVTRSLKRADVVIAVSHHLARLAKTLGAENVKVIPNGLPEFEGSEGGKREYVTFIGALRDYKSPETFVELAKFFPNTEFLVVGDGPLRKRLEAKAPPNVHFLGYRTDVEEILSRSILLVLPSKREGFGLVILEANSLGVPAIGRRVSAIPELIREGKNGLTFTSFDDLVDEVRALLESPKTARKMGSTGKRVAEKYSWEKVAEEVERVYSSLVG

SEQ ID NO: 2037 - protein, 342 aa, Thermococcus kodakaraensis KOD1
  misc_feature (321437)..(321437): n is a or c or g or t.
  misc_feature (52783)..(527833): n is a or c or g or t.
  misc_feature (527901)..(527901): n is a or c or g or t.
  misc_feature (527978)..(527978): n is a or c or g or t.
  misc_feature (960838)..(960839): n is a or c or g or t.
  misc_feature (960860)..(960861): n is a or c or g or t.
  misc_feature (960872)..(960873): n is a or c or g or t.
  misc_feature (960879)..(960879): n is a or c or g or t.
  misc_feature (960890)..(960890): n is a or c or g or t.
  misc_feature (1250239)..(1250239): n is a or c or g or t.
  misc_feature (1302432)..(1302434): n is a or c or g or t.
  misc_feature (1302471)..(1302471): n is a or c or g or t.
  misc_feature (1302488)..(1302488): n is a or c or g or t.
  misc_feature (1674836)..(1674836): n is a or c or g or t.
VRDVTIVINMRDGLDEKKIKVAARLILEGKLVAFPTETVYGLGADALNEGAVRRIFEAKGRPADNPLIIHIASIDDLEKVAREVPEKAKLLAERFWPGPLTLVLPKREEVPLVTTGGLDTVAVRMPAHPIALALIRASTPLAAPSANISGKPSPTSAEHVIDDFYGKIEGIIDGGETWVGVESTVVDLTEEPPVLLRPGGIPLEELEKVIGPIRIHPAVKGKKIDLAKAPGMKYKHYAPNAMVIVVEGTPENRRRKIQELVDEYRKKGHRVGVMATFEVEADEFYFLGKTLEEVARNLFKALRELDKRGVDVIIAEGVEEVGVGLAVMNRLRKAAGYNIVKA

SEQ ID NO: 2038 - protein, 393 aa, Thermococcus kodakaraensis KOD1
  misc_feature (321437)..(321437): n is a or c or g or t.
  misc_feature (52783)..(527833): n is a or c or g or t.
  misc_feature (527901)..(527901): n is a or c or g or t.
  misc_feature (527978)..(527978): n is a or c or g or t.
  misc_feature (960838)..(960839): n is a or c or g or t.
  misc_feature (960860)..(960861): n is a or c or g or t.
  misc_feature (960872)..(960873): n is a or c or g or t.
  misc_feature (960879)..(960879): n is a or c or g or t.
  misc_feature (960890)..(960890): n is a or c or g or t.
  misc_feature (1250239)..(1250239): n is a or c or g or t.
  misc_feature (1302432)..(1302434): n is a or c or g or t.
  misc_feature (1302471)..(1302471): n is a or c or g or t.
  misc_feature (1302488)..(1302488): n is a or c or g or t.
  misc_feature (1674836)..(1674836): n is a or c or g or t.
VRELDLPETTSPEEIEEIGFKYVDSGRVKEGLKLILRAAQRYEERKNYEDAARLFRYIGRYLTRKASPEKARPYLLKAASLYINLVEEEISKPDVDLDALDQYTLNVLEVFAVTGDSRFMTKYGTRFGNIYEELGNSFESSGDLKTAARVYESAFHYYKIVGSETDIKRIAGKLLDIYGEITENLVESKNLSAAADAFYVLAKYVRAIFGHDSHYLEIMETAAKNYEKASKLSYSEGDLDGTATNLVKAQYAYMLCENTGRAKLVGINAVRMLYQIVSSYRAAGDDKATQEKLIELAEALIGINKFDDAVKHYKEALNISSNIEQKIRIRLALLKTYIANQRLYDLLDIVEIAEFYVSRKRPAQAYELLVKILEKNSQLEEVNKKILEAEGYY

SEQ ID NO: 2039 - protein, 463 aa, Thermococcus kodakaraensis KOD1
  misc_feature (321437)..(321437): n is a or c or g or t.
  misc_feature (52783)..(527833): n is a or c or g or t.
  misc_feature (527901)..(527901): n is a or c or g or t.
  misc_feature (527978)..(527978): n is a or c or g or t.
  misc_feature (960838)..(960839): n is a or c or g or t.
  misc_feature (960860)..(960861): n is a or c or g or t.
  misc_feature (960872)..(960873): n is a or c or g or t.
  misc_feature (960879)..(960879): n is a or c or g or t.
  misc_feature (960890)..(960890): n is a or c or g or t.
  misc_feature (1250239)..(1250239): n is a or c or g or t.
  misc_feature (1302432)..(1302434): n is a or c or g or t.
  misc_feature (1302471)..(1302471): n is a or c or g or t.
  misc_feature (1302488)..(1302488): n is a or c or g or t.
  misc_feature (1674836)..(1674836): n is a or c or g or t.
MPMVVLRIPDGSALVYIEKADPSVYFKIYDLLTYKKDYGKWEKPESLYDPYEKTFPVGLLPRVKKFLNSKGYRVRVKDERQIRGEKLNSTWNEKFQMRRYQGRAVKKALKEKMGVLALPVGSGKTIVGLRIIHELDLSALIVVHTKELLYQWAERIEEVLGIKAGIVGDNKWEEGPVTVAMIQTLLSRGVDKLQRDYAIVLFDECHRTSAAEKFYQLGISLPQVYRFGLSATPWRRVRGEEIKIEAVVGPIIYEVRAEDLIREGFLAKPKFEIITYESKMPSFSERYKELYEDMIMNNDERNRAIVKKAIELARKGHRVLIDVRRIEHGKILKEMLEKEGIKAEFLSSQSPNRWEILEAFKSGEIPVLISTLLKEGVDIPEISAIILAGGGKSDIMTIQTIGRALRPKKGMKALIVDIEDDDPLLYTHFIERQKALKQYYGKYYDKGMESIFEEKVPKKRRSS

SEQ ID NO: 2040 - protein, 22 aa, Thermococcus kodakaraensis KOD1
  misc_feature (321437)..(321437): n is a or c or g or t.
  misc_feature (52783)..(527833): n is a or c or g or t.
  misc_feature (527901)..(527901): n is a or c or g or t.
  misc_feature (527978)..(527978): n is a or c or g or t.
  misc_feature (960838)..(960839): n is a or c or g or t.
  misc_feature (960860)..(960861): n is a or c or g or t.
  misc_feature (960872)..(960873): n is a or c or g or t.
  misc_feature (960879)..(960879): n is a or c or g or t.
  misc_feature (960890)..(960890): n is a or c or g or t.
  misc_feature (1250239)..(1250239): n is a or c or g or t.
  misc_feature (1302432)..(1302434): n is a or c or g or t.
  misc_feature (1302471)..(1302471): n is a or c or g or t.
  misc_feature (1302488)..(1302488): n is a or c or g or t.
  misc_feature (1674836)..(1674836): n is a or c or g or t.
MILGGIAFIITWMIGPISTILA

SEQ ID NO: 2041 - protein, 33 aa, Thermococcus kodakaraensis KOD1
  misc_feature (321437)..(321437): n is a or c or g or t.
  misc_feature (52783)..(527833): n is a or c or g or t.
  misc_feature (527901)..(527901): n is a or c or g or t.
  misc_feature (527978)..(527978): n is a or c or g or t.
  misc_feature (960838)..(960839): n is a or c or g or t.
  misc_feature (960860)..(960861): n is a or c or g or t.
  misc_feature (960872)..(960873): n is a or c or g or t.
  misc_feature (960879)..(960879): n is a or c or g or t.
  misc_feature (960890)..(960890): n is a or c or g or t.
  misc_feature (1250239)..(1250239): n is a or c or g or t.
  misc_feature (1302432)..(1302434): n is a or c or g or t.
  misc_feature (1302471)..(1302471): n is a or c or g or t.
  misc_feature (1302488)..(1302488): n is a or c or g or t.
  misc_feature (1674836)..(1674836): n is a or c or g or t.
MIFIAHSRYKEPRKALLLLKVTEEGNAEIAVKL

SEQ ID NO: 2042 - protein, 254 aa, Thermococcus kodakaraensis KOD1
  misc_feature (321437)..(321437): n is a or c or g or t.
  misc_feature (52783)..(527833): n is a or c or g or t.
  misc_feature (527901)..(527901): n is a or c or g or t.
  misc_feature (527978)..(527978): n is a or c or g or t.
  misc_feature (960838)..(960839): n is a or c or g or t.
  misc_feature (960860)..(960861): n is a or c or g or t.
  misc_feature (960872)..(960873): n is a or c or g or t.
  misc_feature (960879)..(960879): n is a or c or g or t.
  misc_feature (960890)..(960890): n is a or c or g or t.
  misc_feature (1250239)..(1250239): n is a or c or g or t.
  misc_feature (1302432)..(1302434): n is a or c or g or t.
  misc_feature (1302471)..(1302471): n is a or c or g or t.
  misc_feature (1302488)..(1302488): n is a or c or g or t.
  misc_feature (1674836)..(1674836): n is a or c or g or t.
MARGIEMAVIVVTGRGGAGKTTTTANLSSHLAMKEYRVLAIDGDLYLPNLGFHFGLDAVKYSVHTLMKNPDIDPEWAIYKHRETGVYVMPGSTQLQDVLGISPRKLVDVIDKVRYKFGVVFVDSPTGVPFDTLPTFQLANYQIIVVEIERSPIYSFEVMVKNEIEKLKALGERYNLNIGVVLNKVRESEDVVDEIINAIETDLDVPVLGWVPFDPNVPASVNAGIPIVKYMPNSDAAIAFREIGDVLEEWIFGE

SEQ ID NO: 2043 - protein, 408 aa, Thermococcus kodakaraensis KOD1
  misc_feature (321437)..(321437): n is a or c or g or t.
  misc_feature (52783)..(527833): n is a or c or g or t.
  misc_feature (527901)..(527901): n is a or c or g or t.
  misc_feature (527978)..(527978): n is a or c or g or t.
  misc_feature (960838)..(960839): n is a or c or g or t.
  misc_feature (960860)..(960861): n is a or c or g or t.
  misc_feature (960872)..(960873): n is a or c or g or t.
  misc_feature (960879)..(960879): n is a or c or g or t.
  misc_feature (960890)..(960890): n is a or c or g or t.
  misc_feature (1250239)..(1250239): n is a or c or g or t.
  misc_feature (1302432)..(1302434): n is a or c or g or t.
  misc_feature (1302471)..(1302471): n is a or c or g or t.
  misc_feature (1302488)..(1302488): n is a or c or g or t.
  misc_feature (1674836)..(1674836): n is a or c or g or t.
MNFEELVEKVASGEIKLHQVEKYTNGDKKLATEIRRKALEKKLGIKLENIGHYSIDPNQVIGKNIENMIGVVQIPMGVAGPLKINGEYAKGEFYIPLATTEGALVASVNRGCSALTAAGGVKTTLIDDKMTRAPLLKCPDARRAREVAEWVKNNLDYLQEKAVSKVTRHGKLRGVRPFIVGNNLYLRFEFETGDAMGMNMVTIASEEIMKVIEEEFPDVKYLALSGNLCVDKKPNAMNFINGRGKTVIAEAVIPRKIVEEKLKTTPELIAEVNYRKNLVGSAQAGSYGFNAHFGNIVGAIFLATGQDEAQITEGSHGITLAEVTPEGDLYISITMPSLEIGTVGGGTRVPTQREALSIMGVAGGGDPPGTNAKKFAEIVAGAVLAGELSLLAAIAAKHLAKAHKELGR

SEQ ID NO: 2044 - protein, 47 aa, Thermococcus kodakaraensis KOD1
  misc_feature (321437)..(321437): n is a or c or g or t.
  misc_feature (52783)..(527833): n is a or c or g or t.
  misc_feature (527901)..(527901): n is a or c or g or t.
  misc_feature (527978)..(527978): n is a or c or g or t.
  misc_feature (960838)..(960839): n is a or c or g or t.
  misc_feature (960860)..(960861): n is a or c or g or t.
  misc_feature (960872)..(960873): n is a or c or g or t.
  misc_feature (960879)..(960879): n is a or c or g or t.
  misc_feature (960890)..(960890): n is a or c or g or t.
  misc_feature (1250239)..(1250239): n is a or c or g or t.
  misc_feature (1302432)..(1302434): n is a or c or g or t.
  misc_feature (1302471)..(1302471): n is a or c or g or t.
  misc_feature (1302488)..(1302488): n is a or c or g or t.
  misc_feature (1674836)..(1674836): n is a or c or g or t.
MGLITAENAFGITFVAITGALVVEGISVFLAIISREFTGRKKQEKIR

SEQ ID NO: 2045 - protein, 108 aa, Thermococcus kodakaraensis KOD1
  misc_feature (321437)..(321437): n is a or c or g or t.
  misc_feature (52783)..(527833): n is a or c or g or t.
  misc_feature (527901)..(527901): n is a or c or g or t.
  misc_feature (527978)..(527978): n is a or c or g or t.
  misc_feature (960838)..(960839): n is a or c or g or t.
  misc_feature (960860)..(960861): n is a or c or g or t.
  misc_feature (960872)..(960873): n is a or c or g or t.
  misc_feature (960879)..(960879): n is a or c or g or t.
  misc_feature (960890)..(960890): n is a or c or g or t.
  misc_feature (1250239)..(1250239): n is a or c or g or t.
  misc_feature (1302432)..(1302434): n is a or c or g or t.
  misc_feature (1302471)..(1302471): n is a or c or g or t.
  misc_feature (1302488)..(1302488): n is a or c or g or t.
  misc_feature (1674836)..(1674836): n is a or c or g or t.
VIKDTCEVIEMVKKAHSFRRKTRGKLSKHPRRRGLPPLTRFLQEFEVGQKVHIVIEPSYHKGMPDPRFHGRTGTVVGKRGDAYIVQITDGGKVKTFFIHPVHLRPQKG

SEQ ID NO: 2046 - protein, 206 aa, Thermococcus kodakaraensis KOD1
  misc_feature (321437)..(321437): n is a or c or g or t.
  misc_feature (52783)..(527833): n is a or c or g or t.
  misc_feature (527901)..(527901): n is a or c or g or t.
  misc_feature (527978)..(527978): n is a or c or g or t.
  misc_feature (960838)..(960839): n is a or c or g or t.
  misc_feature (960860)..(960861): n is a or c or g or t.
  misc_feature (960872)..(960873): n is a or c or g or t.
  misc_feature (960879)..(960879): n is a or c or g or t.
  misc_feature (960890)..(960890): n is a or c or g or t.
  misc_feature (1250239)..(1250239): n is a or c or g or t.
  misc_feature (1302432)..(1302434): n is a or c or g or t.
  misc_feature (1302471)..(1302471): n is a or c or g or t.
  misc_feature (1302488)..(1302488): n is a or c or g or t.
  misc_feature (1674836)..(1674836): n is a or c or g or t.
MDRYRRHSYRESVGKKRHHNEYEEYAYVLDYLPDGYIDIASGRRTGKPVAQVIGEKAFTLLEVTPKTDLMLYERVFIGKGNRDKILLINKRISYDELTDTAKAELPYVVEEIVKNNEERFVQFFNMAPPITNRLHSLELLPGIGKKHMWEIIEERQREPFKSFEDLKQRVKGLPDPVKMIAKRIVDELQDKDRYKLFVGHRRLFRV

SEQ ID NO: 2047 - protein, 609 aa, Thermococcus kodakaraensis KOD1
  misc_feature (321437)..(321437): n is a or c or g or t.
  misc_feature (52783)..(527833): n is a or c or g or t.
  misc_feature (527901)..(527901): n is a or c or g or t.
  misc_feature (527978)..(527978): n is a or c or g or t.
  misc_feature (960838)..(960839): n is a or c or g or t.
  misc_feature (960860)..(960861): n is a or c or g or t.
  misc_feature (960872)..(960873): n is a or c or g or t.
  misc_feature (960879)..(960879): n is a or c or g or t.
  misc_feature (960890)..(960890): n is a or c or g or t.
  misc_feature (1250239)..(1250239): n is a or c or g or t.
  misc_feature (1302432)..(1302434): n is a or c or g or t.
  misc_feature (1302471)..(1302471): n is a or c or g or t.
  misc_feature (1302488)..(1302488): n is a or c or g or t.
  misc_feature (1674836)..(1674836): n is a or c or g or t.
VVISSLAHTPSHSLQHPSFFKTSLRPEYMIVAIIDGYTDEPAGLGVPPYLGIYPRYAYGAIKKARKDASIFYLTIDDLRATFLGEGGIATRNKTPNFPKTKGILEKADIIVYIGGLHTPGKYLSAVPGSVEEVARFLTQFKGEKILGGPAFMGSASMGGIKITSRELQLAHQVFDHVVYGDLEAFLFDYLSNPKDADPLRFRTYAELRDYAIIGAEVVKQFPDYPDFVIVEIETQRGCPKAMGIGGCSFCTEPVRYRRVEDRSVEDVVAEVKALYTLGVRHFRVGRQSCIFSYMAKPDGRVPIPNPEAVEKLFRGIRSVAPNVKTLHVDNANPAVIANYPDESRRIAKALIEYGTPGDVVAFGLESADPKVAKLNNLNATAEETYEAVKLLNEIGGRRGYNGMPWLLPGINIIFGLPGETKKSYEITFQFLKRLLDDGLMVRRINIRQVVVFPGTPLWHMRDKVKVEKHKKLIQHYRYKIRHEIDLPMLRRVVPVGTVLRDVRAEVFDNGLTYGRQIGSYPLIVGMPKQVPLNKFYDVLIVDHGFRSITGIPVPINVNEESPRVLEYIPGIGKKTAVKILAKRPFKTPEEFFEVIGEDKKNVLKDLITL

SEQ ID NO: 2048 - protein, 38 aa, Thermococcus kodakaraensis KOD1
  misc_feature (321437)..(321437): n is a or c or g or t.
  misc_feature (52783)..(527833): n is a or c or g or t.
  misc_feature (527901)..(527901): n is a or c or g or t.
  misc_feature (527978)..(527978): n is a or c or g or t.
  misc_feature (960838)..(960839): n is a or c or g or t.
  misc_feature (960860)..(960861): n is a or c or g or t.
  misc_feature (960872)..(960873): n is a or c or g or t.
  misc_feature (960879)..(960879): n is a or c or g or t.
  misc_feature (960890)..(960890): n is a or c or g or t.
  misc_feature (1250239)..(1250239): n is a or c or g or t.
  misc_feature (1302432)..(1302434): n is a or c or g or t.
  misc_feature (1302471)..(1302471): n is a or c or g or t.
  misc_feature (1302488)..(1302488): n is a or c or g or t.
  misc_feature (1674836)..(1674836): n is a or c or g or t.
MNTLNNASFHMAREIARLRTETVARAFLLFVWTTSAVI

SEQ ID NO: 2049 - protein, 328 aa, Thermococcus kodakaraensis KOD1
  misc_feature (321437)..(321437): n is a or c or g or t.
  misc_feature (52783)..(527833): n is a or c or g or t.
  misc_feature (527901)..(527901): n is a or c or g or t.
  misc_feature (527978)..(527978): n is a or c or g or t.
  misc_feature (960838)..(960839): n is a or c or g or t.
  misc_feature (960860)..(960861): n is a or c or g or t.
  misc_feature (960872)..(960873): n is a or c or g or t.
  misc_feature (960879)..(960879): n is a or c or g or t.
  misc_feature (960890)..(960890): n is a or c or g or t.
  misc_feature (1250239)..(1250239): n is a or c or g or t.
  misc_feature (1302432)..(1302434): n is a or c or g or t.
  misc_feature (1302471)..(1302471): n is a or c or g or t.
  misc_feature (1302488)..(1302488): n is a or c or g or t.
  misc_feature (1674836)..(1674836): n is a or c or g or t.
VMRFMRFGPSILFLRTPHSEAVSEDITKIFGAKPIPTDRAIKESSEFETLLFVTFEWQKETIPPELGFLIRDSARSVLAAIINNGLPIEKVHVESTIIFLRVPEKVEEALKFLSEELNGEVMSLRDALDEGEARDTVIAVTRKRLSCPLGPEEVEGAVLVREHFLKVYRRLSIEAPMLLLKLMPEWNEITIKIYDTEKRYEENIARLMMVLEDLDLGFVVGEGWDWDYPRPFMRVPVYKLKLLTWEDPVKVKFFLKGLEYRDYKRFCDIDVFVEGKKIDWIKLGKFDSKFELAKAAREELEKHLSEDVKKRLHEIEEKLLKEAENEKG

SEQ ID NO: 2050 - protein, 248 aa, Thermococcus kodakaraensis KOD1
  misc_feature (321437)..(321437): n is a or c or g or t.
  misc_feature (52783)..(527833): n is a or c or g or t.
  misc_feature (527901)..(527901): n is a or c or g or t.
  misc_feature (527978)..(527978): n is a or c or g or t.
  misc_feature (960838)..(960839): n is a or c or g or t.
  misc_feature (960860)..(960861): n is a or c or g or t.
  misc_feature (960872)..(960873): n is a or c or g or t.
  misc_feature (960879)..(960879): n is a or c or g or t.
  misc_feature (960890)..(960890): n is a or c or g or t.
  misc_feature (1250239)..(1250239): n is a or c or g or t.
  misc_feature (1302432)..(1302434): n is a or c or g or t.
  misc_feature (1302471)..(1302471): n is a or c or g or t.
  misc_feature (1302488)..(1302488): n is a or c or g or t.
  misc_feature (1674836)..(1674836): n is a or c or g or t.
VGRMDNGIRVKLVNYTKKPLETVTWAALISYWDEWETETFGRMSDKDVEMHLPRVLGYGHESILEHATLTFAIEGCSRVCSHQLVRHRLASYTQQSQRYIVLNPEDVEETFVIPSGIKEDPELLAEWKELMKKSIELYKKSVERGQHQEDARFILPQAVRTKIVVTMNLRELKHFLGLRACERAQWEIREVAWKMLEEIAKNDELRPIIKWAKLGPRCVQLGYCPEGELMPPGCWKRTGEKWKTLFEG

SEQ ID NO: 2051 - protein, 414 aa, Thermococcus kodakaraensis KOD1
  misc_feature (321437)..(321437): n is a or c or g or t.
  misc_feature (52783)..(527833): n is a or c or g or t.
  misc_feature (527901)..(527901): n is a or c or g or t.
  misc_feature (527978)..(527978): n is a or c or g or t.
  misc_feature (960838)..(960839): n is a or c or g or t.
  misc_feature (960860)..(960861): n is a or c or g or t.
  misc_feature (960872)..(960873): n is a or c or g or t.
  misc_feature (960879)..(960879): n is a or c or g or t.
  misc_feature (960890)..(960890): n is a or c or g or t.
  misc_feature (1250239)..(1250239): n is a or c or g or t.
  misc_feature (1302432)..(1302434): n is a or c or g or t.
  misc_feature (1302471)..(1302471): n is a or c or g or t.
  misc_feature (1302488)..(1302488): n is a or c or g or t.
  misc_feature (1674836)..(1674836): n is a or c or g or t.
VIDMKKRKGLLIILDGLGDRPIKEFGGKTPLEYANTPNMDRLAKMGILGQQDPIKPGQPAGSDTAHLSIFGYDPYKVYRGRGFLEALGVGLDLNEDDLAFRVNFATIENGIITDRRAGRISTEEAHELAKAVQENVKLPVDFIFVGATGHRAVLVLRGMAKGYRVGENDPHEAGKPPQEFTWEDEESKKVAEILEEFVQKAHEVLDKHPINEKRRKEGKPPANYLLIRGAGTYPDIPMKFTEQWKVKAGAVIAVSLVKGVARAIGFDVYTPEGATGEYNTDVMAKAKKTVELLKDYDFVFLHFKPTDAAGHDNNPKLKAEMIEKADRMIGYILEHIDLEDVVIAITGDHSTPCEVMNHSGDPVPLLIAGGGVRPDHTESFGERECMRGGIGRIKGHDIVPIMMDLMNRSEKFGA

SEQ ID NO: 2052 - protein, 137 aa, Thermococcus kodakaraensis KOD1
  misc_feature (321437)..(321437): n is a or c or g or t.
  misc_feature (52783)..(527833): n is a or c or g or t.
  misc_feature (527901)..(527901): n is a or c or g or t.
  misc_feature (527978)..(527978): n is a or c or g or t.
  misc_feature (960838)..(960839): n is a or c or g or t.
  misc_feature (960860)..(960861): n is a or c or g or t.
  misc_feature (960872)..(960873): n is a or c or g or t.
  misc_feature (960879)..(960879): n is a or c or g or t.
  misc_feature (960890)..(960890): n is a or c or g or t.
  misc_feature (1250239)..(1250239): n is a or c or g or t.
  misc_feature (1302432)..(1302434): n is a or c or g or t.
  misc_feature (1302471)..(1302471): n is a or c or g or t.
  misc_feature (1302488)..(1302488): n is a or c or g or t.
  misc_feature (1674836)..(1674836): n is a or c or g or t.
MNAQELLQKLESKGVTLEAMLDTAMELYIGEEKEAAREKLRGLMLRYLNDINVQALLMAALLLEEGFKVEGDPVNLVADELIGINLAEYIGGKMALFNFFYYDTRKPGILAELPPFLDDAIGGFIAGCMTKLFEGEL

SEQ ID NO: 2053 - protein, 624 aa, Thermococcus kodakaraensis KOD1
  misc_feature (321437)..(321437): n is a or c or g or t.
  misc_feature (52783)..(527833): n is a or c or g or t.
  misc_feature (527901)..(527901): n is a or c or g or t.
  misc_feature (527978)..(527978): n is a or c or g or t.
  misc_feature (960838)..(960839): n is a or c or g or t.
  misc_feature (960860)..(960861): n is a or c or g or t.
  misc_feature (960872)..(960873): n is a or c or g or t.
  misc_feature (960879)..(960879): n is a or c or g or t.
  misc_feature (960890)..(960890): n is a or c or g or t.
  misc_feature (1250239)..(1250239): n is a or c or g or t.
  misc_feature (1302432)..(1302434): n is a or c or g or t.
  misc_feature (1302471)..(1302471): n is a or c or g or t.
  misc_feature (1302488)..(1302488): n is a or c or g or t.
  misc_feature (1674836)..(1674836): n is a or c or g or t.
VCLMYGYQNKIARVNLTTGKVTYEELPDEVIRKFIGGKGLGYYIIYREVPPGTDPLSPANKFVFAAGGLTGLVPGSSKVIAISKSPETRLISDSSGGDAFGPKLRGHFDALIIEGKSEEPVYLYIHDGKVEIKDASHLWGKGNYEVAKELWKEYPTASMAMVGPAGERLSRIADIIYDTERASGRGGLGAVLGSKRVKAVVVEPGEKPKVAEPEEFQRLWQEYYNEFATNPKYEHTRTYGTTDALRSAASLGMSPAYNFSRPYIPDELASKLGGDEVKKYEVEPEWFVHGKSCPIKCARYVEVEYKGKKIRVKPEYESIAMLGAATGVFDFPAVAYFIHLVNDYGMDSIATGATIGWLFEMVERGLISEDEIGFPVKGFGDAEAEERLIKLMAERKGIGAILADGVKRACERLGRGCEFAVHVKGMESPAWDPRGRRTYGLSYATADVGASHLRGWPRPHQLPNQGPAKELVPSLIEGRDESYITDMLGTCKFVPYKMEDLAKLYSVATGEEWTVEELRKRAWGVESIARIHDALDWVTPPLDDTIPPRWWEPEPDGPAKGNAAFIDYNDFLEARREFYRLRGWHEELGVPLPETMEKLGLPEFKEDAARAIDVVKKRMEFSGQ

SEQ ID NO: 2054 - protein, 393 aa, Thermococcus kodakaraensis KOD1
  misc_feature (321437)..(321437): n is a or c or g or t.
  misc_feature (52783)..(527833): n is a or c or g or t.
  misc_feature (527901)..(527901): n is a or c or g or t.
  misc_feature (527978)..(527978): n is a or c or g or t.
  misc_feature (960838)..(960839): n is a or c or g or t.
  misc_feature (960860)..(960861): n is a or c or g or t.
  misc_feature (960872)..(960873): n is a or c or g or t.
  misc_feature (960879)..(960879): n is a or c or g or t.
  misc_feature (960890)..(960890): n is a or c or g or t.
  misc_feature (1250239)..(1250239): n is a or c or g or t.
  misc_feature (1302432)..(1302434): n is a or c or g or t.
  misc_feature (1302471)..(1302471): n is a or c or g or t.
  misc_feature (1302488)..(1302488): n is a or c or g or t.
  misc_feature (1674836)..(1674836): n is a or c or g or t.
MKSISSTFPPLVLKTLLFEASFNPTGVEMGEKKGLSFFEKYLSVWVALCIIAGIALGKLIPSVPEALSKLTIENVNMPIAVLIWAMIYPMMVKVDFSAIKRVHKGQMLKGLTVTWVTNWLIKPFSMFLISSFFIGTLFSIKLGIIEPSLAKEYIAGAILLGAAPCTAMVFVWSYLADGDPLYTLVQVATNDLIILFAFAPIVGFLMGLNEVPVPYDTLLLSVVLFVVIPLTAGYISRRHILKTKGPVWFERQFLPKLSTVSIAGLLLTLILLFSFQGKIILENPLHIALIAIPLTIQTYFIFAIAYGWAWLWKLPHKVAAPASFIGASNFFELAVAVAIALFGLESGAALATVVGVLEEVPIMLSLVWIANKTRGLFTAKFEAGNAVPTLAEE

SEQ ID NO: 2055 - protein, 245 aa, Thermococcus kodakaraensis KOD1
  misc_feature (321437)..(321437): n is a or c or g or t.
  misc_feature (52783)..(527833): n is a or c or g or t.
  misc_feature (527901)..(527901): n is a or c or g or t.
  misc_feature (527978)..(527978): n is a or c or g or t.
  misc_feature (960838)..(960839): n is a or c or g or t.
  misc_feature (960860)..(960861): n is a or c or g or t.
  misc_feature (960872)..(960873): n is a or c or g or t.
  misc_feature (960879)..(960879): n is a or c or g or t.
  misc_feature (960890)..(960890): n is a or c or g or t.
  misc_feature (1250239)..(1250239): n is a or c or g or t.
  misc_feature (1302432)..(1302434): n is a or c or g or t.
  misc_feature (1302471)..(1302471): n is a or c or g or t.
  misc_feature (1302488)..(1302488): n is a or c or g or t.
  misc_feature (1674836)..(1674836): n is a or c or g or t.
VSYPYVITGITLALAGFLIIEFLGKRYGWRAYLFGASIVLLGVGATSTAVMIGNRGVPIVNPNDWVVLTAPIIVTLTYSLLVLHGGMIEETPEEINIKSGVTIARKIEERSLKGYPVLAFMRKRISVPGWKTYWITAAGRDETSIYPTELHKIVDMVARYVAEAKNKGVTPVVLVEGLELLAMYNDFKALLKALATIHDILVVENGALIILLEEDAWDRRELELLRSVLGIGVSAPKKLKPTVSK

SEQ ID NO: 2056 - protein, 420 aa, Thermococcus kodakaraensis KOD1
  misc_feature (321437)..(321437): n is a or c or g or t.
  misc_feature (52783)..(527833): n is a or c or g or t.
  misc_feature (527901)..(527901): n is a or c or g or t.
  misc_feature (527978)..(527978): n is a or c or g or t.
  misc_feature (960838)..(960839): n is a or c or g or t.
  misc_feature (960860)..(960861): n is a or c or g or t.
  misc_feature (960872)..(960873): n is a or c or g or t.
  misc_feature (960879)..(960879): n is a or c or g or t.
  misc_feature (960890)..(960890): n is a or c or g or t.
  misc_feature (1250239)..(1250239): n is a or c or g or t.
  misc_feature (1302432)..(1302434): n is a or c or g or t.
  misc_feature (1302471)..(1302471): n is a or c or g or t.
  misc_feature (1302488)..(1302488): n is a or c or g or t.
  misc_feature (1674836)..(1674836): n is a or c or g or t.
MFPHQRGSVMEMPRLWVEKLCTDPELYIIRVDDDQIRYFEATWDIPEGITYNAYLMKLDGAVVLFDTTKKEYTDLFMDALRKLVDPKEITHIIVHHTEPDHSGALPKVLEENGYRAQVIGTQFARNLLQGFYGDKVVENFKVVKDGEEMQIGGKTFRFIAVPWLHWPDTMITYVVEDRIIFSCDAGGGYSIPETIDDSDEEFVEKYLPHVTKYIVTVIGHYHKYIVQNIKKLKSLGIVESARMILPGHGLVWKRDPLRIFEHYERVGAGVSEKDKVLVIYDSMYGFVERRMEIVLDELRKHGKKPVVYRFTDKEAPAVSDILGEVPSAEALIIGASTYEAEIHPRIRYALYEIVDKANYEKPVLIVGAFGWGGVAGRKIETMITRSKFDHVATVESKGYPTPEDEEKLREAVRKLVQWTL

SEQ ID NO: 2057 - protein, 248 aa, Thermococcus kodakaraensis KOD1
  misc_feature (321437)..(321437): n is a or c or g or t.
  misc_feature (52783)..(527833): n is a or c or g or t.
  misc_feature (527901)..(527901): n is a or c or g or t.
  misc_feature (527978)..(527978): n is a or c or g or t.
  misc_feature (960838)..(960839): n is a or c or g or t.
  misc_feature (960860)..(960861): n is a or c or g or t.
  misc_feature (960872)..(960873): n is a or c or g or t.
  misc_feature (960879)..(960879): n is a or c or g or t.
  misc_feature (960890)..(960890): n is a or c or g or t.
  misc_feature (1250239)..(1250239): n is a or c or g or t.
  misc_feature (1302432)..(1302434): n is a or c or g or t.
  misc_feature (1302471)..(1302471): n is a or c or g or t.
  misc_feature (1302488)..(1302488): n is a or c or g or t.
  misc_feature (1674836)..(1674836): n is a or c or g or t.
VFNFIGTTKSLFNFGCINIYWWSSVNILIFGPPGSGKSTHSRTIMEKYGLVYISSGDLIRREIERKSSLGREMEAYLSRGDLIPDTIVNTLIISKLRRQRENFILDGYPRTPEQVISLENYLFDHGIKLDLALEIFIDEDTSVERISGRRICPNCGAVYHVKYNPPKVPGICDVCGSELIQRADDREEVVRKRYRIYSKNMEPIIKFYRAKGIYVRVDGDGPISEVWKRIQPLLDYIHSREEKRKEHE

SEQ ID NO: 2058 - protein, 269 aa, Thermococcus kodakaraensis KOD1
  misc_feature (321437)..(321437): n is a or c or g or t.
  misc_feature (52783)..(527833): n is a or c or g or t.
  misc_feature (527901)..(527901): n is a or c or g or t.
  misc_feature (527978)..(527978): n is a or c or g or t.
  misc_feature (960838)..(960839): n is a or c or g or t.
  misc_feature (960860)..(960861): n is a or c or g or t.
  misc_feature (960872)..(960873): n is a or c or g or t.
  misc_feature (960879)..(960879): n is a or c or g or t.
  misc_feature (960890)..(960890): n is a or c or g or t.
  misc_feature (1250239)..(1250239): n is a or c or g or t.
  misc_feature (1302432)..(1302434): n is a or c or g or t.
  misc_feature (1302471)..(1302471): n is a or c or g or t.
  misc_feature (1302488)..(1302488): n is a or c or g or t.
  misc_feature (1674836)..(1674836): n is a or c or g or t.
MGVGEFFYRYFVEPIKYNQGYNPVNTLVYAVILGIMVLLLYRILKRMGIRIDDRFFLSLMPYIVLGPLMRAITDEGLLPRTYLTVSPGGYFVIAAFAIASLFAVWRHLGPDERLYPIYRDFGWVLVGGLVFIIIINWGKLSVRWEYFKYFIPSLAVSEAFIWALAKKFKLIVDNKVLFYTHFYDATTTFVGIQFFGFWEQHVLARTLIDLTGTPAVMYLEKLLVLIPVVYILDRMMEDEDPELINFVKLAIFVLGFGPGTRNLLIALLG

SEQ ID NO: 2059 - protein, 158 aa, Thermococcus kodakaraensis KOD1
  misc_feature (321437)..(321437): n is a or c or g or t.
  misc_feature (52783)..(527833): n is a or c or g or t.
  misc_feature (527901)..(527901): n is a or c or g or t.
  misc_feature (527978)..(527978): n is a or c or g or t.
  misc_feature (960838)..(960839): n is a or c or g or t.
  misc_feature (960860)..(960861): n is a or c or g or t.
  misc_feature (960872)..(960873): n is a or c or g or t.
  misc_feature (960879)..(960879): n is a or c or g or t.
  misc_feature (960890)..(960890): n is a or c or g or t.
  misc_feature (1250239)..(1250239): n is a or c or g or t.
  misc_feature (1302432)..(1302434): n is a or c or g or t.
  misc_feature (1302471)..(1302471): n is a or c or g or t.
  misc_feature (1302488)..(1302488): n is a or c or g or t.
  misc_feature (1674836)..(1674836): n is a or c or g or t.
MLGYQSKCTDYFFLPKLARVPQLFLAKTFSGKACILIPMKIIKVPSNDSIGIIPYGSPPEVELEIQVKQRKGELVLWITNPNTTKVEIDNEVELYEFIGYWQKLDPGIVFLRKMIVLIPGETIEQKLPLELPPGRYMVVKHAYVNGARVRVEKEFTVR

SEQ ID NO: 2060 - protein, 237 aa, Thermococcus kodakaraensis KOD1
  misc_feature (321437)..(321437): n is a or c or g or t.
  misc_feature (52783)..(527833): n is a or c or g or t.
  misc_feature (527901)..(527901): n is a or c or g or t.
  misc_feature (527978)..(527978): n is a or c or g or t.
  misc_feature (960838)..(960839): n is a or c or g or t.
  misc_feature (960860)..(960861): n is a or c or g or t.
  misc_feature (960872)..(960873): n is a or c or g or t.
  misc_feature (960879)..(960879): n is a or c or g or t.
  misc_feature (960890)..(960890): n is a or c or g or t.
  misc_feature (1250239)..(1250239): n is a or c or g or t.
  misc_feature (1302432)..(1302434): n is a or c or g or t.
  misc_feature (1302471)..(1302471): n is a or c or g or t.
  misc_feature (1302488)..(1302488): n is a or c or g or t.
  misc_feature (1674836)..(1674836): n is a or c or g or t.
MAKPVLLTLNVVPCTFLKRLNRFVALVEVNGETRKALVTNTGRLEEFMIPGRKAFCVPKEGGKTDFVLVAFEDEEGKGAVIDTRTQARAFERALELGLVPWLRDCSIKKKEIKVGSSRLDYLFECPGGDVYAEMKSAVLRGGEKGEYAMYPDCPSTRGQRHIRELIELSKAGKRAMIFFIGAMPGVEKFRPYEKGDPEIARLLKGARKAGVEIHALSISLLPDGKIVLERPELEVEV

SEQ ID NO: 2061 - protein, 306 aa, Thermococcus kodakaraensis KOD1
  misc_feature (321437)..(321437): n is a or c or g or t.
  misc_feature (52783)..(527833): n is a or c or g or t.
  misc_feature (527901)..(527901): n is a or c or g or t.
  misc_feature (527978)..(527978): n is a or c or g or t.
  misc_feature (960838)..(960839): n is a or c or g or t.
  misc_feature (960860)..(960861): n is a or c or g or t.
  misc_feature (960872)..(960873): n is a or c or g or t.
  misc_feature (960879)..(960879): n is a or c or g or t.
  misc_feature (960890)..(960890): n is a or c or g or t.
  misc_feature (1250239)..(1250239): n is a or c or g or t.
  misc_feature (1302432)..(1302434): n is a or c or g or t.
  misc_feature (1302471)..(1302471): n is a or c or g or t.
  misc_feature (1302488)..(1302488): n is a or c or g or t.
  misc_feature (1674836)..(1674836): n is a or c or g or t.
VVKMAIVDVRILVEGASDVEVVSKALQGLALGSEYNITISAIIPTTNVEIAKSAAAGADLLIIATDADRVGRELAERLFNELGEMVGHIERMKLPLGHDLEHVDVELVRKELKNTLVRAGLKSLQVLPEYMELRKQLLDIKGKYDELANEYEALYKEHEELQKKYDELYSEYKRLASENEGLKELLEKRARPVKIEDAWKNLFPAEPVPDEKILALAVEKLGLNGKIIVGQGYIFAEEDALIEELLKTVYLSLAVKDELESEKPKAEPRVYPAEPKPVEPETENIVENPEVKPEELERLLKGMDNE

SEQ ID NO: 2062 - protein, 94 aa, Thermococcus kodakaraensis KOD1
  misc_feature (321437)..(321437): n is a or c or g or t.
  misc_feature (52783)..(527833): n is a or c or g or t.
  misc_feature (527901)..(527901): n is a or c or g or t.
  misc_feature (527978)..(527978): n is a or c or g or t.
  misc_feature (960838)..(960839): n is a or c or g or t.
  misc_feature (960860)..(960861): n is a or c or g or t.
  misc_feature (960872)..(960873): n is a or c or g or t.
  misc_feature (960879)..(960879): n is a or c or g or t.
  misc_feature (960890)..(960890): n is a or c or g or t.
  misc_feature (1250239)..(1250239): n is a or c or g or t.
  misc_feature (1302432)..(1302434): n is a or c or g or t.
  misc_feature (1302471)..(1302471): n is a or c or g or t.
  misc_feature (1302488)..(1302488): n is a or c or g or t.
  misc_feature (1674836)..(1674836): n is a or c or g or t.
MKFIKETKEGVLIMIYVQPKAKKNAIEGVDGWRGRLKVRIAAPPVEGKANKEVVKFFSKLLGAEVNIVRGETSREKDLLVKGLSVEEVRKKLGV

SEQ ID NO: 2063 - protein, 306 aa, Thermococcus kodakaraensis KOD1
  misc_feature (321437)..(321437): n is a or c or g or t.
  misc_feature (52783)..(527833): n is a or c or g or t.
  misc_feature (527901)..(527901): n is a or c or g or t.
  misc_feature (527978)..(527978): n is a or c or g or t.
  misc_feature (960838)..(960839): n is a or c or g or t.
  misc_feature (960860)..(960861): n is a or c or g or t.
  misc_feature (960872)..(960873): n is a or c or g or t.
  misc_feature (960879)..(960879): n is a or c or g or t.
  misc_feature (960890)..(960890): n is a or c or g or t.
  misc_feature (1250239)..(1250239): n is a or c or g or t.
  misc_feature (1302432)..(1302434): n is a or c or g or t.
  misc_feature (1302471)..(1302471): n is a or c or g or t.
  misc_feature (1302488)..(1302488): n is a or c or g or t.
  misc_feature (1674836)..(1674836): n is a or c or g or t.
MPMMLIATAVFMAWAIGANDSAKAVGTAVGSGILGFKRAVLLIGVFVFLGAFLGGSGVSNTVSGLARGMEPVTIGLVLFSSAITVTLASLWGNPISTTQAIIGALIGASLAEGLPVNWPVIGKIVLTWVVSPALAGVLAVGTYIPYKHLLNRIKHIKILELTQKWLAFTASAYASFNLGANELANVIGLADGGAGVKGLLAVALGVGALTFSYEVMMTVGRDLAPLGPTSGFSAQMGAALAVTLANLFGIPVSSGQAIVGAISGVSLYKGERPNKKALKGILRGWVTAPTASGVLAFILVSMFSSI

SEQ ID NO: 2064 - protein, 583 aa, Thermococcus kodakaraensis KOD1
  misc_feature (321437)..(321437): n is a or c or g or t.
  misc_feature (52783)..(527833): n is a or c or g or t.
  misc_feature (527901)..(527901): n is a or c or g or t.
  misc_feature (527978)..(527978): n is a or c or g or t.
  misc_feature (960838)..(960839): n is a or c or g or t.
  misc_feature (960860)..(960861): n is a or c or g or t.
  misc_feature (960872)..(960873): n is a or c or g or t.
  misc_feature (960879)..(960879): n is a or c or g or t.
  misc_feature (960890)..(960890): n is a or c or g or t.
  misc_feature (1250239)..(1250239): n is a or c or g or t.
  misc_feature (1302432)..(1302434): n is a or c or g or t.
  misc_feature (1302471)..(1302471): n is a or c or g or t.
  misc_feature (1302488)..(1302488): n is a or c or g or t.
  misc_feature (1674836)..(1674836): n is a or c or g or t.
VRKMVDFRFEVKARDASGRIGKLTVNGKTVETPAIMPVINPKQLIVTPKELKEMGFGMIITNSYIIYKTPELREKALEVGIHKLLDYDGIIEVDSGSFQLMRYGGVEVTNREIVEFQHEIGVDIGTFLDIPTPPDAPREKAEEDLRITLERAKEAEEIKEIAMNAAVQGSTYPDLRTYAARELSRMNFEIHPIGAVVPLMESYRYRDLVDVVIASKVGLRPDRPVHLFGAGHPMIFALAVAMGIDLFDSASYALYAKDDRYMTPEGTKRLEELEYFPCSCPVCSRYTPQELREMPKEERTRLLAIHNLWVIREELNRVKQAIKEGELWRLVDERARSHPKLYAAYKRLLEYREYLEKNEPVTKASAFFKVSEEALRWPIVERARERAERVRSKFPETISHPIFGEIPKYLSLSYPFAQSEGEEDFTVEKPEKGEARKYVMAVAEYQFGEGAGEAFKDAFVELSRKTGMPRQIKAKGKHLATFRAEDGLLTLGIEGAKRLHEVLPFPRMRVVVDEDAEPFARRGKNVFAKFVVDADLNIRPYDEVLVVNRNDELLATGQTLLNGEELKIFQQGLAVKVRRGVEK

SEQ ID NO: 2065 - protein, 401 aa, Thermococcus kodakaraensis KOD1
  misc_feature (321437)..(321437): n is a or c or g or t.
  misc_feature (52783)..(527833): n is a or c or g or t.
  misc_feature (527901)..(527901): n is a or c or g or t.
  misc_feature (527978)..(527978): n is a or c or g or t.
  misc_feature (960838)..(960839): n is a or c or g or t.
  misc_feature (960860)..(960861): n is a or c or g or t.
  misc_feature (960872)..(960873): n is a or c or g or t.
  misc_feature (960879)..(960879): n is a or c or g or t.
  misc_feature (960890)..(960890): n is a or c or g or t.
  misc_feature (1250239)..(1250239): n is a or c or g or t.
  misc_feature (1302432)..(1302434): n is a or c or g or t.
  misc_feature (1302471)..(1302471): n is a or c or g or t.
  misc_feature (1302488)..(1302488): n is a or c or g or t.
  misc_feature (1674836)..(1674836): n is a or c or g or t.
MIALIGDVIDAERILQNHAVLVEGNTISAVVPAEKVREFGPDEVYGGDGFFVIPGLINAHTHVAMAKFRGLGEDMPTEEWLEKIIWPMELEWTAGEIREWARIGIMEALMNGSTTINDHYFFADEIAREAEKMGVRAFIGQTVMDLVDFPHADPEEGFKFFRRWQEKSELVTPTLAPHATNTVSLELMREMAELSEETNARIHVHLAQSRTEVKEVKKRYSLNPVEYLKQAGALSDRLIGVHGVYLTNEEIRTLASAGSTLVHCPTSNVKLEGTTINLPEVLRAGVNVAIGNDSPNPVGIMDMFLEMRTSGLSANLLERKAHSIPARKIFEIATIGGARALGIKAGLIREGYLADLLLIDARKPWFKPMESPYSLLVYSTRGSDVALTMVNGKIVWKKGGK

SEQ ID NO: 2066 - protein, 239 aa, Thermococcus kodakaraensis KOD1
  misc_feature (321437)..(321437): n is a or c or g or t.
  misc_feature (52783)..(527833): n is a or c or g or t.
  misc_feature (527901)..(527901): n is a or c or g or t.
  misc_feature (527978)..(527978): n is a or c or g or t.
  misc_feature (960838)..(960839): n is a or c or g or t.
  misc_feature (960860)..(960861): n is a or c or g or t.
  misc_feature (960872)..(960873): n is a or c or g or t.
  misc_feature (960879)..(960879): n is a or c or g or t.
  misc_feature (960890)..(960890): n is a or c or g or t.
  misc_feature (1250239)..(1250239): n is a or c or g or t.
  misc_feature (1302432)..(1302434): n is a or c or g or t.
  misc_feature (1302471)..(1302471): n is a or c or g or t.
  misc_feature (1302488)..(1302488): n is a or c or g or t.
  misc_feature (1674836)..(1674836): n is a or c or g or t.
MRLMRDSAVKRRILAAIEDGPVSGEKLAEGLGISRVAVWKHIRELKRLGYKIEASHAGYFLRERPDVPYPWELPVKAYYLEETSSTMDVAWKLAERGRDFFVIAGSQKSGRGRKGSRWLSPPGGLWFSLVASPELSLSEAGKMSKAAREVIAEYLQGKGIPAEVSENGVFVHGKKIAGVLVEVAGELDAIRFAVVGVGINVKNPVPEGATSMALELGDVSLLGTARELLPKLLDNLKAF

SEQ ID NO: 2067 - protein, 256 aa, Thermococcus kodakaraensis KOD1
  misc_feature (321437)..(321437): n is a or c or g or t.
  misc_feature (52783)..(527833): n is a or c or g or t.
  misc_feature (527901)..(527901): n is a or c or g or t.
  misc_feature (527978)..(527978): n is a or c or g or t.
  misc_feature (960838)..(960839): n is a or c or g or t.
  misc_feature (960860)..(960861): n is a or c or g or t.
  misc_feature (960872)..(960873): n is a or c or g or t.
  misc_feature (960879)..(960879): n is a or c or g or t.
  misc_feature (960890)..(960890): n is a or c or g or t.
  misc_feature (1250239)..(1250239): n is a or c or g or t.
  misc_feature (1302432)..(1302434): n is a or c or g or t.
  misc_feature (1302471)..(1302471): n is a or c or g or t.
  misc_feature (1302488)..(1302488): n is a or c or g or t.
  misc_feature (1674836)..(1674836): n is a or c or g or t.
VIGQFYIRKDSFMHSLDPRVKIIGMLLGIITLMLFNQPLLLLALFIGLLIIGKVLAGADFSYQFRLLKPLFPIVLITLALWPVIYKPRLEGFFIGIAYSARLLGFALVTFLLLMTTTQKELVLGFVRLGLPYELGLTLTIALRYIPTLYWLARTIMDAQRSRGLELDKGNLLTRMRKMTSVLIPLIVASLKTAHELSIALESRAFGASKKRTFLRDLEMKPRDYAVLALLLVGFSLALYARYVLGFGHVNLYQGGA

SEQ ID NO: 2068 - protein, 446 aa, Thermococcus kodakaraensis KOD1
  misc_feature (321437)..(321437): n is a or c or g or t.
  misc_feature (52783)..(527833): n is a or c or g or t.
  misc_feature (527901)..(527901): n is a or c or g or t.
  misc_feature (527978)..(527978): n is a or c or g or t.
  misc_feature (960838)..(960839): n is a or c or g or t.
  misc_feature (960860)..(960861): n is a or c or g or t.
  misc_feature (960872)..(960873): n is a or c or g or t.
  misc_feature (960879)..(960879): n is a or c or g or t.
  misc_feature (960890)..(960890): n is a or c or g or t.
  misc_feature (1250239)..(1250239): n is a or c or g or t.
  misc_feature (1302432)..(1302434): n is a or c or g or t.
  misc_feature (1302471)..(1302471): n is a or c or g or t.
  misc_feature (1302488)..(1302488): n is a or c or g or t.
  misc_feature (1674836)..(1674836): n is a or c or g or t.
MTETITMADAKAIIENQIEELARRNKEPEWMTKIRYKALEAFERAPHKDPVISEEQLLHFIAKPEVKGLPDHIESLDDLPPEMKALLDRLGISEVEQKYIAGLAVQTDTGVIYNQFLQDWAKKGLIVLPTEEAVRKYPDIVKQHFLKLFRADESKLTAYHTAVWNGGIFLYVKEGLKVPFPLHLFFLIQESALAQAPHIIIIAERNTEFHLIEGCTAPILLKHSLHLDMTEAYFHEGAKAQLTVLQNWPEYVHTRPMTRAKVGRGARFINTTVTLGSGKSNIGDPHYWVEEGGHVELNGIILGQKDFYVDLGGRMFLQGPGASGINASKAVIMDESTVVTRGIIEADAPKTKGHISCDALLMSDKAVMETYPGLISRVDDAELSHEAAIGKIREEELFYLMSRGLDEEKATQLIVKGFLDPMLKDIPMEFLVEIRKIIELAVSGGM

SEQ ID NO: 2069 - protein, 314 aa, Thermococcus kodakaraensis KOD1
  misc_feature (321437)..(321437): n is a or c or g or t.
  misc_feature (52783)..(527833): n is a or c or g or t.
  misc_feature (527901)..(527901): n is a or c or g or t.
  misc_feature (527978)..(527978): n is a or c or g or t.
  misc_feature (960838)..(960839): n is a or c or g or t.
  misc_feature (960860)..(960861): n is a or c or g or t.
  misc_feature (960872)..(960873): n is a or c or g or t.
  misc_feature (960879)..(960879): n is a or c or g or t.
  misc_feature (960890)..(960890): n is a or c or g or t.
  misc_feature (1250239)..(1250239): n is a or c or g or t.
  misc_feature (1302432)..(1302434): n is a or c or g or t.
  misc_feature (1302471)..(1302471): n is a or c or g or t.
  misc_feature (1302488)..(1302488): n is a or c or g or t.
  misc_feature (1674836)..(1674836): n is a or c or g or t.
MAAEEAIIAKNLVKRYGDFEAVRGISFTVKRGEAFALLGPNGAGKTTTVRMLTTLTRITSGEAYVNGYDVKKEGLMVRRSIGLVPDISNLYEELTVEENLKFTANLYDAPKENVARLIKEFNLPAKRKFGKLSSGFKRRVTIAAALVHEPEILFLDEPTNGLDVHSAKALRALIRELNKRGMTIFLTTHNMVEAETIPQRVAIMNKGKIIAEGTRTELPKLIGKGTRIRLQVEPLSNKLLDALSAYGPTFDEGDIVITVPDADAFMAELCKLREELGFKVLKVSTEAPSIEEVFIELTTEVPKGGACGCGGCPL

SEQ ID NO: 2070 - protein, 672 aa, Thermococcus kodakaraensis KOD1
  misc_feature (321437)..(321437): n is a or c or g or t.
  misc_feature (52783)..(527833): n is a or c or g or t.
  misc_feature (527901)..(527901): n is a or c or g or t.
  misc_feature (527978)..(527978): n is a or c or g or t.
  misc_feature (960838)..(960839): n is a or c or g or t.
  misc_feature (960860)..(960861): n is a or c or g or t.
  misc_feature (960872)..(960873): n is a or c or g or t.
  misc_feature (960879)..(960879): n is a or c or g or t.
  misc_feature (960890)..(960890): n is a or c or g or t.
  misc_feature (1250239)..(1250239): n is a or c or g or t.
  misc_feature (1302432)..(1302434): n is a or c or g or t.
  misc_feature (1302471)..(1302471): n is a or c or g or t.
  misc_feature (1302488)..(1302488): n is a or c or g or t.
  misc_feature (1674836)..(1674836): n is a or c or g or t.
MSEVVIALIGNPNAGKTTLFNALTGLRQHVGNWPGVTVEKKEGEFEYKEMKFRVVDLPGVYGLTAYSIDEKIARDFIVKEKPRVVVDIVDASNLERNLYLTLQLLEIGANVVVALNKMDLAEEKGYKIDPKKLEEALGVPVVPMVASEGKGIEELKAKIVEAIKGKPRPIEYPNFEAYIERIMRVIERDDELVRNYNPRWLAIKLLEGDDEARGIVEKSRLRDDILRELINVSGELHKKYGDVELALADERYGLIEEIAKRAIVKKEDRITFSDMLDEVLTHKYLGVPIFISLMWAVFKFTFDVSAPFSDIIDWFFSWLGDEVGAHVANDALASLLRDGIIGGLGSVLVFLPPIAFLFLAFSWLEDSGYMARAAFVMDRVMHHFGLHGKSVIPMIMGFGCNVPAIMATRTLEDEKDRILTILVNPLMSCPARLPIYAVFAGAFFAGREGTVITSMYLLGIAFALIIAWLFRKLIFKGEPSYFVMELPPYNRPNWGTIFGTAWTRTEKFLRKAGTVIFAGVIVVWLLSVTGPSGYLGSEALENGELLAKSWVASLGHALQPLFAPMGWDWKAAVALFFGFIAKEIVVGTLGVLYGVGDNEQAISQAMAASGAFNPATAYAFMAFSLIYVPCLATIAVIKQEAGWKWALFAVAYELILAYIVALLIVAVGGVFL

SEQ ID NO: 2071 - protein, 310 aa, Thermococcus kodakaraensis KOD1
  misc_feature (321437)..(321437): n is a or c or g or t.
  misc_feature (52783)..(527833): n is a or c or g or t.
  misc_feature (527901)..(527901): n is a or c or g or t.
  misc_feature (527978)..(527978): n is a or c or g or t.
  misc_feature (960838)..(960839): n is a or c or g or t.
  misc_feature (960860)..(960861): n is a or c or g or t.
  misc_feature (960872)..(960873): n is a or c or g or t.
  misc_feature (960879)..(960879): n is a or c or g or t.
  misc_feature (960890)..(960890): n is a or c or g or t.
  misc_feature (1250239)..(1250239): n is a or c or g or t.
  misc_feature (1302432)..(1302434): n is a or c or g or t.
  misc_feature (1302471)..(1302471): n is a or c or g or t.
  misc_feature (1302488)..(1302488): n is a or c or g or t.
  misc_feature (1674836)..(1674836): n is a or c or g or t.
MSVCTKLITNSATLISGGESLQIAVSGGKGGTGKSTVATNLAVALRKIGVRLTLADLDVEAPNDHILLGVELANEEPVNQFMPRFDYSKCTKCRKCAEVCEEHAIVTLKDGTPFLMPTLCSGCRACEIVCPVPGAIQEAFRVIGHTYVTPTPYGFTLVTGKLREGEERSMPLVVAAKKRAEEVREGLLMVDTAAGTGNTVSKAVEGSKLLIAVTEPTPLGIHDTELILQLGKLMKIPTWVVVNRSDLGDVGKVRELAEKYGAEIVAEIPYSENIVKSYVEGKPIALTDYPEAEIFKGLAERVAEFLGGGA

SEQ ID NO: 2072 - protein, 233 aa, Thermococcus kodakaraensis KOD1
  misc_feature (321437)..(321437): n is a or c or g or t.
  misc_feature (52783)..(527833): n is a or c or g or t.
  misc_feature (527901)..(527901): n is a or c or g or t.
  misc_feature (527978)..(527978): n is a or c or g or t.
  misc_feature (960838)..(960839): n is a or c or g or t.
  misc_feature (960860)..(960861): n is a or c or g or t.
  misc_feature (960872)..(960873): n is a or c or g or t.
  misc_feature (960879)..(960879): n is a or c or g or t.
  misc_feature (960890)..(960890): n is a or c or g or t.
  misc_feature (1250239)..(1250239): n is a or c or g or t.
  misc_feature (1302432)..(1302434): n is a or c or g or t.
  misc_feature (1302471)..(1302471): n is a or c or g or t.
  misc_feature (1302488)..(1302488): n is a or c or g or t.
  misc_feature (1674836)..(1674836): n is a or c or g or t.
MMKNLLKTSVIVGFRSFVYPIYMLIGLAYGLMLLAFPEQYLPTMVPIFLLFEPGLVGFMFVGTEIFAEKKDGAISALAVTPIEWRSYILAKTIIMSVLSVIGAILIMAVGTRSLDGLPYVIAGVFLCSAVYTLLGIAISAKYRDLDDYFIPIMAVLVVSLLPFAHYHGYLTHPLWKVLYLVPSYPALYFFKAPFVEVSSDTLALSGVALLLWSAVAYYAAKIQFYKYAVEGLR

SEQ ID NO: 2073 - protein, 23 aa, Thermococcus kodakaraensis KOD1
  misc_feature (321437)..(321437): n is a or c or g or t.
  misc_feature (52783)..(527833): n is a or c or g or t.
  misc_feature (527901)..(527901): n is a or c or g or t.
  misc_feature (527978)..(527978): n is a or c or g or t.
  misc_feature (960838)..(960839): n is a or c or g or t.
  misc_feature (960860)..(960861): n is a or c or g or t.
  misc_feature (960872)..(960873): n is a or c or g or t.
  misc_feature (960879)..(960879): n is a or c or g or t.
  misc_feature (960890)..(960890): n is a or c or g or t.
  misc_feature (1250239)..(1250239): n is a or c or g or t.
  misc_feature (1302432)..(1302434): n is a or c or g or t.
  misc_feature (1302471)..(1302471): n is a or c or g or t.
  misc_feature (1302488)..(1302488): n is a or c or g or t.
  misc_feature (1674836)..(1674836): n is a or c or g or t.
MRSHKYKKLKKGMKKLIEEVEND

SEQ ID NO: 2074 - protein, 329 aa, Thermococcus kodakaraensis KOD1
  misc_feature (321437)..(321437): n is a or c or g or t.
  misc_feature (52783)..(527833): n is a or c or g or t.
  misc_feature (527901)..(527901): n is a or c or g or t.
  misc_feature (527978)..(527978): n is a or c or g or t.
  misc_feature (960838)..(960839): n is a or c or g or t.
  misc_feature (960860)..(960861): n is a or c or g or t.
  misc_feature (960872)..(960873): n is a or c or g or t.
  misc_feature (960879)..(960879): n is a or c or g or t.
  misc_feature (960890)..(960890): n is a or c or g or t.
  misc_feature (1250239)..(1250239): n is a or c or g or t.
  misc_feature (1302432)..(1302434): n is a or c or g or t.
  misc_feature (1302471)..(1302471): n is a or c or g or t.
  misc_feature (1302488)..(1302488): n is a or c or g or t.
  misc_feature (1674836)..(1674836): n is a or c or g or t.
MRKIRLGIVGCGIAAKTLHIPALKELSDIFEVAAVTSRTKEHAVECAELVGGAEVFESYEELLRSGEVDAVDLALPVELNLPFIKKAVENGVHVICEKPISTDVKTGKEIVKIANGSDVVVYIAENFRHVPAFWKAKELIDAGKIGEPVFTSWHVWVGMDEGNPYVHTGWRKSPKHVGGFLSDGGVHHVAAMRLIFGDVAWISAAVRDLSPLLGGLDFMSSLLEFESGVVGTYTAGYSIKGKDRFEIVGTDGRMLVEWDRILLNGEEIGVNPENSYKLEFEDFYRVVMGERENVLGSPLEALKDLAVIEAAVKSNGHRIDLKSLLDWSG

SEQ ID NO: 2075 - protein, 148 aa, Thermococcus kodakaraensis KOD1
  misc_feature (321437)..(321437): n is a or c or g or t.
  misc_feature (52783)..(527833): n is a or c or g or t.
  misc_feature (527901)..(527901): n is a or c or g or t.
  misc_feature (527978)..(527978): n is a or c or g or t.
  misc_feature (960838)..(960839): n is a or c or g or t.
  misc_feature (960860)..(960861): n is a or c or g or t.
  misc_feature (960872)..(960873): n is a or c or g or t.
  misc_feature (960879)..(960879): n is a or c or g or t.
  misc_feature (960890)..(960890): n is a or c or g or t.
  misc_feature (1250239)..(1250239): n is a or c or g or t.
  misc_feature (1302432)..(1302434): n is a or c or g or t.
  misc_feature (1302471)..(1302471): n is a or c or g or t.
  misc_feature (1302488)..(1302488): n is a or c or g or t.
  misc_feature (1674836)..(1674836): n is a or c or g or t.
VIEMSEIQVVAFRVGNEEFCLEISKVREIKEMMPITRVPNAPDYVEGVINLRGQITTVVNLKKKLGYYDDEDLSNKKIIIAEVKGEIVGIIVDAVSDVVTLTEDQIEPTPKTLASRMDTRFIKGIAKINNGERLLIMVDLDKLLGEEW

SEQ ID NO: 2076 - protein, 199 aa, Thermococcus kodakaraensis KOD1
  misc_feature (321437)..(321437): n is a or c or g or t.
  misc_feature (52783)..(527833): n is a or c or g or t.
  misc_feature (527901)..(527901): n is a or c or g or t.
  misc_feature (527978)..(527978): n is a or c or g or t.
  misc_feature (960838)..(960839): n is a or c or g or t.
  misc_feature (960860)..(960861): n is a or c or g or t.
  misc_feature (960872)..(960873): n is a or c or g or t.
  misc_feature (960879)..(960879): n is a or c or g or t.
  misc_feature (960890)..(960890): n is a or c or g or t.
  misc_feature (1250239)..(1250239): n is a or c or g or t.
  misc_feature (1302432)..(1302434): n is a or c or g or t.
  misc_feature (1302471)..(1302471): n is a or c or g or t.
  misc_feature (1302488)..(1302488): n is a or c or g or t.
  misc_feature (1674836)..(1674836): n is a or c or g or t.
VNVPDAQIREALKYYEQKDPILATIYKTLVFSGLRLKAVIELFNEFDPEKLILPREYPNIAKYPIHKQKGQKKAFYAYLPRDFALTELEQLPLDYEHVKNRLRVKLRSVRNTEKSVQFSAAAVREWFATFLARKGCPFEVINFIQGRAERGVLEKHYLNLEILADEWYSSVVDDLKLVLEGGWRSKRAKLGISLRGEEK

SEQ ID NO: 2077 - protein, 644 aa, Thermococcus kodakaraensis KOD1
  misc_feature (321437)..(321437): n is a or c or g or t.
  misc_feature (52783)..(527833): n is a or c or g or t.
  misc_feature (527901)..(527901): n is a or c or g or t.
  misc_feature (527978)..(527978): n is a or c or g or t.
  misc_feature (960838)..(960839): n is a or c or g or t.
  misc_feature (960860)..(960861): n is a or c or g or t.
  misc_feature (960872)..(960873): n is a or c or g or t.
  misc_feature (960879)..(960879): n is a or c or g or t.
  misc_feature (960890)..(960890): n is a or c or g or t.
  misc_feature (1250239)..(1250239): n is a or c or g or t.
  misc_feature (1302432)..(1302434): n is a or c or g or t.
  misc_feature (1302471)..(1302471): n is a or c or g or t.
  misc_feature (1302488)..(1302488): n is a or c or g or t.
  misc_feature (1674836)..(1674836): n is a or c or g or t.
MVVSTVVGVVVGGACMAGTMGFGTGACVAMGMAAAGLTYSALELAFGGSRGGDSDSGATITYERQANGTTVKNDDDELNKVIDDANQQAYERIAELTAKLRSDLVRYDTKEDGATGDLWIEIYAPSKIYGFSAFPVQAKLYTKESNIPFNVIHLRSVEIYLQKENSSVPLWKRVWDYGTGSEGLNGQSVVYSTILKVPDDWVYQVQNAIQTGQVTRDLIEQIFSANTSTWEIFVKVDAYREVWQNDPQYTDQSSCTAQPNHKWDSNTSTCYVFVRNDDIKYTAYTTSAWRHVSMAHDIADLADGFYASLPVKFLNTEASTKWALYQEKYAGALSNFIILTFATPVHVIGSTADYKFYIVPNPGYFEPLNPSFNDDFRFVAVREYKDLSWTVADSIFGNLGTMSPDTPTQKLLTAHYTEDLSTLTYKVYGLAYFTITRDDNITIPLWLVVNPKVSVIPNTRTVLADNQIDQLVQFTDDGKLEASEINQTKAIAASLINGLQEKITAAEDLKKKADAEGNEKASLYAEKAIQAYQDAIEALNKITQTDAVQEYLNWLNVAKKLEQAGDFYMSAAEKALYGEYEQAELDAQKGDELSQLADEYKPHIDILTTAKSMLSKKILGIPLWALLAIVFVLVGAFVVWRKLL

SEQ ID NO: 2078 - protein, 158 aa, Thermococcus kodakaraensis KOD1
  misc_feature (321437)..(321437): n is a or c or g or t.
  misc_feature (52783)..(527833): n is a or c or g or t.
  misc_feature (527901)..(527901): n is a or c or g or t.
  misc_feature (527978)..(527978): n is a or c or g or t.
  misc_feature (960838)..(960839): n is a or c or g or t.
  misc_feature (960860)..(960861): n is a or c or g or t.
  misc_feature (960872)..(960873): n is a or c or g or t.
  misc_feature (960879)..(960879): n is a or c or g or t.
  misc_feature (960890)..(960890): n is a or c or g or t.
  misc_feature (1250239)..(1250239): n is a or c or g or t.
  misc_feature (1302432)..(1302434): n is a or c or g or t.
  misc_feature (1302471)..(1302471): n is a or c or g or t.
  misc_feature (1302488)..(1302488): n is a or c or g or t.
  misc_feature (1674836)..(1674836): n is a or c or g or t.
VRRMKFIGMKSYIHILYMIIVLAAVVSTAGCIGWGDGGIIIGFGNETYTIPLNTSNSTNSTIPTSELTIHRYEELVYVGGNLTIQELNLTIRPDYDPNKGKFFFIFPDTIYWEPMNVTINNITIIGTGYFTGTTYYIANITILSPEKLTVIVNNPEGQ

SEQ ID NO: 2079 - protein, 82 aa, Thermococcus kodakaraensis KOD1
  misc_feature (321437)..(321437): n is a or c or g or t.
  misc_feature (52783)..(527833): n is a or c or g or t.
  misc_feature (527901)..(527901): n is a or c or g or t.
  misc_feature (527978)..(527978): n is a or c or g or t.
  misc_feature (960838)..(960839): n is a or c or g or t.
  misc_feature (960860)..(960861): n is a or c or g or t.
  misc_feature (960872)..(960873): n is a or c or g or t.
  misc_feature (960879)..(960879): n is a or c or g or t.
  misc_feature (960890)..(960890): n is a or c or g or t.
  misc_feature (1250239)..(1250239): n is a or c or g or t.
  misc_feature (1302432)..(1302434): n is a or c or g or t.
  misc_feature (1302471)..(1302471): n is a or c or g or t.
  misc_feature (1302488)..(1302488): n is a or c or g or t.
  misc_feature (1674836)..(1674836): n is a or c or g or t.
MYGLPAFLIYGAAHIGIIGRIASADDELLLRKVIRDFHRIKNPKVKSFREYKDVKPWLKGRGWFSFDKMYTERIYFRPPQSL

SEQ ID NO: 2080 - protein, 183 aa, Thermococcus kodakaraensis KOD1
  misc_feature (321437)..(321437): n is a or c or g or t.
  misc_feature (52783)..(527833): n is a or c or g or t.
  misc_feature (527901)..(527901): n is a or c or g or t.
  misc_feature (527978)..(527978): n is a or c or g or t.
  misc_feature (960838)..(960839): n is a or c or g or t.
  misc_feature (960860)..(960861): n is a or c or g or t.
  misc_feature (960872)..(960873): n is a or c or g or t.
  misc_feature (960879)..(960879): n is a or c or g or t.
  misc_feature (960890)..(960890): n is a or c or g or t.
  misc_feature (1250239)..(1250239): n is a or c or g or t.
  misc_feature (1302432)..(1302434): n is a or c or g or t.
  misc_feature (1302471)..(1302471): n is a or c or g or t.
  misc_feature (1302488)..(1302488): n is a or c or g or t.
  misc_feature (1674836)..(1674836): n is a or c or g or t.
MKRFKNLIVIIDRSTEHETRKGFTVLALVGVWDSEVGHLKRIIFRELNLKHAKKYGSAKKAKMDMLKAALKGERTNLTSHLHFIRVYRISVTGKIRDRDLPQRFYDDFEELYPDCKFILGDKDIISILKRKYPDLKTIEEKESKTTAKQYKHLMLLVDNIAYFARIAYLENDLEFLELLRKGP

SEQ ID NO: 2081 - protein, 81 aa, Thermococcus kodakaraensis KOD1
  misc_feature (321437)..(321437): n is a or c or g or t.
  misc_feature (52783)..(527833): n is a or c or g or t.
  misc_feature (527901)..(527901): n is a or c or g or t.
  misc_feature (527978)..(527978): n is a or c or g or t.
  misc_feature (960838)..(960839): n is a or c or g or t.
  misc_feature (960860)..(960861): n is a or c or g or t.
  misc_feature (960872)..(960873): n is a or c or g or t.
  misc_feature (960879)..(960879): n is a or c or g or t.
  misc_feature (960890)..(960890): n is a or c or g or t.
  misc_feature (1250239)..(1250239): n is a or c or g or t.
  misc_feature (1302432)..(1302434): n is a or c or g or t.
  misc_feature (1302471)..(1302471): n is a or c or g or t.
  misc_feature (1302488)..(1302488): n is a or c or g or t.
  misc_feature (1674836)..(1674836): n is a or c or g or t.
MSESAIWSWVALEKRKLDAVLEQVEEVPTLLEYVEREASIARETAFSLSARGERENAAYWTGYADALEDLLKKIERREVRA

SEQ ID NO: 2082 - protein, 359 aa, Thermococcus kodakaraensis KOD1
  misc_feature (321437)..(321437): n is a or c or g or t.
  misc_feature (52783)..(527833): n is a or c or g or t.
  misc_feature (527901)..(527901): n is a or c or g or t.
  misc_feature (527978)..(527978): n is a or c or g or t.
  misc_feature (960838)..(960839): n is a or c or g or t.
  misc_feature (960860)..(960861): n is a or c or g or t.
  misc_feature (960872)..(960873): n is a or c or g or t.
  misc_feature (960879)..(960879): n is a or c or g or t.
  misc_feature (960890)..(960890): n is a or c or g or t.
  misc_feature (1250239)..(1250239): n is a or c or g or t.
  misc_feature (1302432)..(1302434): n is a or c or g or t.
  misc_feature (1302471)..(1302471): n is a or c or g or t.
  misc_feature (1302488)..(1302488): n is a or c or g or t.
  misc_feature (1674836)..(1674836): n is a or c or g or t.
VVLMEIRYKPEELTRLPRSVRYEPGRVTMIDQTLLPREFREIELRTVDEVAEAIITMKVRGAPAIGAAAAFGLALYADTSNARTKEEFMDGFERAYERLKNTRPTAVNLFWALNRVKSLVEEHLEDPLDEIKRLIVAEAQKIANEDVEANLRMGHYGAEVLPEGNVLTHCNAGSLATVQLGTVGAVLRVMHRDGTLKLLWVDETRPVLQGARLSAWEYHYDGIPLKLISDNMAGFVMQQGKVDAIIVGADRIVANGDFANKIGTYTLAVLAKEHGIPFFTVAPLSTIDMSLKSGKEIPIEERKPEEVLTCGGCKIAPDVDVYNPAFDVTPHKYLTGIITDQGVVWPPFERNLKKLFKRE

SEQ ID NO: 2083 - protein, 484 aa, Thermococcus kodakaraensis KOD1
  misc_feature (321437)..(321437): n is a or c or g or t.
  misc_feature (52783)..(527833): n is a or c or g or t.
  misc_feature (527901)..(527901): n is a or c or g or t.
  misc_feature (527978)..(527978): n is a or c or g or t.
  misc_feature (960838)..(960839): n is a or c or g or t.
  misc_feature (960860)..(960861): n is a or c or g or t.
  misc_feature (960872)..(960873): n is a or c or g or t.
  misc_feature (960879)..(960879): n is a or c or g or t.
  misc_feature (960890)..(960890): n is a or c or g or t.
  misc_feature (1250239)..(1250239): n is a or c or g or t.
  misc_feature (1302432)..(1302434): n is a or c or g or t.
  misc_feature (1302471)..(1302471): n is a or c or g or t.
  misc_feature (1302488)..(1302488): n is a or c or g or t.
  misc_feature (1674836)..(1674836): n is a or c or g or t.
VVEMAVERKKWSENFSEWYNELIETAGIQDKRYPVKGMNVWLPYGLKIMRNIERFIHAEMERTGHDEVLFPALIPETEFQKEAEHIKGFEGEVYWVTHAGLEPLDVRLILRPTSETAMYSMFSLWIRSHADLPFKIYQIVNVYRYETKHTRPLIRVREISRFFEAHTAHDSYEDAERQIKEDLEIFDNLARFLALPYIISKRPEWDKFPGAYYSLGAEVMMPDGRTLQIGTMHNYRQNFAKAYNIQYETETGDHEYVHQTTFGMSERLLAAVIAIHGDDRGMVLPPTIAPIQVVIVPIPKKDSEADVFAYAREIAEELRTAGIRVHVDERDIRPGRKYYDWELKGVPLRIEVGPRDVEGKKAVLARRDTLEKITVERDNIVEEVRKTLDAIHENLYQRAKEFLESHIKRVDTIEEAKAVFEDRRGIVEIPWCGEEECGLRMEEELDAKMLGIPYPEEKAKAPEGKKCPVCGREAKFIARFARTY

SEQ ID NO: 2084 - protein, 422 aa, Thermococcus kodakaraensis KOD1
  misc_feature (321437)..(321437): n is a or c or g or t.
  misc_feature (52783)..(527833): n is a or c or g or t.
  misc_feature (527901)..(527901): n is a or c or g or t.
  misc_feature (527978)..(527978): n is a or c or g or t.
  misc_feature (960838)..(960839): n is a or c or g or t.
  misc_feature (960860)..(960861): n is a or c or g or t.
  misc_feature (960872)..(960873): n is a or c or g or t.
  misc_feature (960879)..(960879): n is a or c or g or t.
  misc_feature (960890)..(960890): n is a or c or g or t.
  misc_feature (1250239)..(1250239): n is a or c or g or t.
  misc_feature (1302432)..(1302434): n is a or c or g or t.
  misc_feature (1302471)..(1302471): n is a or c or g or t.
  misc_feature (1302488)..(1302488): n is a or c or g or t.
  misc_feature (1674836)..(1674836): n is a or c or g or t.
VMKMSDGHDGYKIIHDGIHGSMKVSGVILDLVKTPEFQRLRQIKQLGLAYLVYPGANHSRFEHSLGAWHLAKRLSEEVGLPKEESELLQVGALLHDIGHGPLSHTFEGIYKHYVKERDHMRLGQDIILGNINITGDEDGGRIPEILEKHGIDPKAVADIILGRSEKPYLGQMLHGGVDVDQLDYLVRDAHYTGVAHGIIDLERLLKVMKIHDGQLVVDEKGIEAVEGMMVARALMYSRVYFHHTVKIAEGMLTRALEFALDEGHLWDFWRMTDCRVLVELEDLEGLPAELTKRVLHRKLYKAAVLITAEELSTEEKRELLNAYRNVKKRQEIERNLADAVGASEGEVILEFSIADLMLSEPRLKETGINVLLDNGEIQPLTKVTPLANALKRRQTPRWAVMIASPEKYVDRLREVWRRVIFS

SEQ ID NO: 2085 - protein, 173 aa, Thermococcus kodakaraensis KOD1
  misc_feature (321437)..(321437): n is a or c or g or t.
  misc_feature (52783)..(527833): n is a or c or g or t.
  misc_feature (527901)..(527901): n is a or c or g or t.
  misc_feature (527978)..(527978): n is a or c or g or t.
  misc_feature (960838)..(960839): n is a or c or g or t.
  misc_feature (960860)..(960861): n is a or c or g or t.
  misc_feature (960872)..(960873): n is a or c or g or t.
  misc_feature (960879)..(960879): n is a or c or g or t.
  misc_feature (960890)..(960890): n is a or c or g or t.
  misc_feature (1250239)..(1250239): n is a or c or g or t.
  misc_feature (1302432)..(1302434): n is a or c or g or t.
  misc_feature (1302471)..(1302471): n is a or c or g or t.
  misc_feature (1302488)..(1302488): n is a or c or g or t.
  misc_feature (1674836)..(1674836): n is a or c or g or t.
MEIEIKFRVEFEDIRRKIEGLGASFIREEVQEDLYFSLPLPNLLRVRKIPNLGKAFLTYKSIQDPGRNEEFDELEVEVSDFETTVEILKRLGFEEDVWIRKRRLVYKLDDVTFELSDVEGLGAFLDIEVMSKDVEYAKRRIWEIAEKLGLSEKDVEPRLYQELLKEKIQTSSS

SEQ ID NO: 2086 - protein, 458 aa, Thermococcus kodakaraensis KOD1
  misc_feature (321437)..(321437): n is a or c or g or t.
  misc_feature (52783)..(527833): n is a or c or g or t.
  misc_feature (527901)..(527901): n is a or c or g or t.
  misc_feature (527978)..(527978): n is a or c or g or t.
  misc_feature (960838)..(960839): n is a or c or g or t.
  misc_feature (960860)..(960861): n is a or c or g or t.
  misc_feature (960872)..(960873): n is a or c or g or t.
  misc_feature (960879)..(960879): n is a or c or g or t.
  misc_feature (960890)..(960890): n is a or c or g or t.
  misc_feature (1250239)..(1250239): n is a or c or g or t.
  misc_feature (1302432)..(1302434): n is a or c or g or t.
  misc_feature (1302471)..(1302471): n is a or c or g or t.
  misc_feature (1302488)..(1302488): n is a or c or g or t.
  misc_feature (1674836)..(1674836): n is a or c or g or t.
VMAMEELERALKWAENNLNAEYIELRYEDLRKTTLGLKDGVFTSFTGKLHRGVAIRVLADGAWGFASTSDLTNLEKKIEEAYKLAKAAAQTKKEKIELAEIKPVEDFVKSKMKIKPREVDIEEKVSHLRELEKILKEDEAVKSVQIRYEDGGGKKLLLTNEGTRIEWDYNYLYQGAYVTGKADGKLAMARDSIGAVDYGWELMTKREPNEKVAERLKRKMWSQLKGVAPKRGEWPIVAGPIVVGIIAHEALGHLAEADLTINSPFKDLIGKQIAPEFVTMSERIVEGGFGNDKYDDEGVPVKDIHIIENGILKEIMLNREYAAKWGMEPNGHARAESYRYPPIIRMRNTIFEPGDHSFEELIEDIKFGYYVVDFRGGQAQLNSAFQVGIQEGYVIRNGEIAEPIRDTSITGVAIEALKKISAVGKDFGLEVGFCGKGQTAFVSSGGPHMRFDGGIIIG

SEQ ID NO: 2087 - protein, 79 aa, Thermococcus kodakaraensis KOD1
  misc_feature (321437)..(321437): n is a or c or g or t.
  misc_feature (52783)..(527833): n is a or c or g or t.
  misc_feature (527901)..(527901): n is a or c or g or t.
  misc_feature (527978)..(527978): n is a or c or g or t.
  misc_feature (960838)..(960839): n is a or c or g or t.
  misc_feature (960860)..(960861): n is a or c or g or t.
  misc_feature (960872)..(960873): n is a or c or g or t.
  misc_feature (960879)..(960879): n is a or c or g or t.
  misc_feature (960890)..(960890): n is a or c or g or t.
  misc_feature (1250239)..(1250239): n is a or c or g or t.
  misc_feature (1302432)..(1302434): n is a or c or g or t.
  misc_feature (1302471)..(1302471): n is a or c or g or t.
  misc_feature (1302488)..(1302488): n is a or c or g or t.
  misc_feature (1674836)..(1674836): n is a or c or g or t.
VGGSMKVRYDPRGDILYIEVSSGKAAETVEIDDDLLVDYDEKGNIVGIEIWRAREVLLGEMFRKIKELGLDLKTAEVEG

SEQ ID NO: 2088 - protein, 441 aa, Thermococcus kodakaraensis KOD1
  misc_feature (321437)..(321437): n is a or c or g or t.
  misc_feature (52783)..(527833): n is a or c or g or t.
  misc_feature (527901)..(527901): n is a or c or g or t.
  misc_feature (527978)..(527978): n is a or c or g or t.
  misc_feature (960838)..(960839): n is a or c or g or t.
  misc_feature (960860)..(960861): n is a or c or g or t.
  misc_feature (960872)..(960873): n is a or c or g or t.
  misc_feature (960879)..(960879): n is a or c or g or t.
  misc_feature (960890)..(960890): n is a or c or g or t.
  misc_feature (1250239)..(1250239): n is a or c or g or t.
  misc_feature (1302432)..(1302434): n is a or c or g or t.
  misc_feature (1302471)..(1302471): n is a or c or g or t.
  misc_feature (1302488)..(1302488): n is a or c or g or t.
  misc_feature (1674836)..(1674836): n is a or c or g or t.
MENLIRFGEKFFDELEIAVYRSRDIEASVELNEISMASTRSGALTIIRGIKDKRLGLAIVDSDEPEKVKEAIEQAAKMAKLNSPDEKWVSLPEPGKYREKPKPNYELKEASPDILVEKLVKGIKLAREKDKNAVVAGGAGGVSWEERHVLNSHGLDVFQEGGAAYMYLEIVGRKGSVVTPGIFDFDARRDLNLDVEGIVERAVQKVQWAYNVVPSKNEEVPLIFGPWAIAGLFSYTLLPAFSGERLVKETTPLAGKVGEKIASEVITLYDDPFHPLSLRPTIADDEGVPTRKNVLIENGAFKGFVWDNYWAKIYGTESTGNGKRDIRSGGINIGFHSVVIENGKRSLEDIIGEIDRGYLVDGLQGAHSSNPDNGNFAVTANPAFLIEDGEVKGSAVFLIAGNVYELLQQASEVSKEQTVMPFMNTMITPHIKFENVKIAGK

SEQ ID NO: 2089 - protein, 384 aa, Thermococcus kodakaraensis KOD1
  misc_feature (321437)..(321437): n is a or c or g or t.
  misc_feature (52783)..(527833): n is a or c or g or t.
  misc_feature (527901)..(527901): n is a or c or g or t.
  misc_feature (527978)..(527978): n is a or c or g or t.
  misc_feature (960838)..(960839): n is a or c or g or t.
  misc_feature (960860)..(960861): n is a or c or g or t.
  misc_feature (960872)..(960873): n is a or c or g or t.
  misc_feature (960879)..(960879): n is a or c or g or t.
  misc_feature (960890)..(960890): n is a or c or g or t.
  misc_feature (1250239)..(1250239): n is a or c or g or t.
  misc_feature (1302432)..(1302434): n is a or c or g or t.
  misc_feature (1302471)..(1302471): n is a or c or g or t.
  misc_feature (1302488)..(1302488): n is a or c or g or t.
  misc_feature (1674836)..(1674836): n is a or c or g or t.
MNFDPVSEAKRIGSLIVSWRRDFHMHPELGYEEERTSRIVEEHLREWGYSIKRVGTGIIADIGEGEKTIALRADMDALPIQEENEVPYKSKVPGKMHACGHDAHTAMLLGAAKIIAEHRDELKGRVRLIFQPAEEGGNGAVKMIEGGALEGVDAIFGFHVWMDLPSGIIGIRDGPFLAGAGIFNGKIIGKGGHGASPHETVDPIPIAAETVLAFQTIVSRNIEPIETGVVSVTSVHGGTAFNVIPEEVEFKGTFRFFKPEVGELIQMRMREILDGITKAHRARYELSIEELTPPTINTKEMADFARKVAEKYGLKYGEVRPTMGAEDFAFYLQKVPGAFLALGIRNEEKGIIYPHHHPKFDVDEDVLYIGTAMEVALAFEFLSE

SEQ ID NO: 2090 - protein, 70 aa, Thermococcus kodakaraensis KOD1
  misc_feature (321437)..(321437): n is a or c or g or t.
  misc_feature (52783)..(527833): n is a or c or g or t.
  misc_feature (527901)..(527901): n is a or c or g or t.
  misc_feature (527978)..(527978): n is a or c or g or t.
  misc_feature (960838)..(960839): n is a or c or g or t.
  misc_feature (960860)..(960861): n is a or c or g or t.
  misc_feature (960872)..(960873): n is a or c or g or t.
  misc_feature (960879)..(960879): n is a or c or g or t.
  misc_feature (960890)..(960890): n is a or c or g or t.
  misc_feature (1250239)..(1250239): n is a or c or g or t.
  misc_feature (1302432)..(1302434): n is a or c or g or t.
  misc_feature (1302471)..(1302471): n is a or c or g or t.
  misc_feature (1302488)..(1302488): n is a or c or g or t.
  misc_feature (1674836)..(1674836): n is a or c or g or t.
MKNQRVLKALESGPKTVDEIAKETGISPMEVRRYLLRFAEQGKVESFQREGKIFWKIREKREEEEEFKYV

SEQ ID NO: 2091 - protein, 329 aa, Thermococcus kodakaraensis KOD1
  misc_feature (321437)..(321437): n is a or c or g or t.
  misc_feature (52783)..(527833): n is a or c or g or t.
  misc_feature (527901)..(527901): n is a or c or g or t.
  misc_feature (527978)..(527978): n is a or c or g or t.
  misc_feature (960838)..(960839): n is a or c or g or t.
  misc_feature (960860)..(960861): n is a or c or g or t.
  misc_feature (960872)..(960873): n is a or c or g or t.
  misc_feature (960879)..(960879): n is a or c or g or t.
  misc_feature (960890)..(960890): n is a or c or g or t.
  misc_feature (1250239)..(1250239): n is a or c or g or t.
  misc_feature (1302432)..(1302434): n is a or c or g or t.
  misc_feature (1302471)..(1302471): n is a or c or g or t.
  misc_feature (1302488)..(1302488): n is a or c or g or t.
  misc_feature (1674836)..(1674836): n is a or c or g or t.
VVRMRKRSLTLFSDGNLFRRENTLYFENAQGRKPLAVEGIYDIYVYGHVNISSQALHFLAQKGIPVHFFNHYGHYDGSFYPRESLLSGDLIIKQAKHYLDQEKRLILAKLFVRGSALNMEKNLKRWKVADGFSGLLDELFEELESARKITEVMNVEARIRGEYYTRWDNALPEGFKIVKRTRRPPENEMNALISFLNSRLYATIVSELYNTQLAPTVSYLHEPGERRFSLALDLSEIFKPIIADRIANRLVKQGIIKREHFRGELNGVLLTKEGMKVVLKAYNEELGRSVKHPGLKKNVTKQRLIRLEAYKLIKHLVGVKDYEPLVAWF

SEQ ID NO: 2092 - protein, 121 aa, Thermococcus kodakaraensis KOD1
  misc_feature (321437)..(321437): n is a or c or g or t.
  misc_feature (52783)..(527833): n is a or c or g or t.
  misc_feature (527901)..(527901): n is a or c or g or t.
  misc_feature (527978)..(527978): n is a or c or g or t.
  misc_feature (960838)..(960839): n is a or c or g or t.
  misc_feature (960860)..(960861): n is a or c or g or t.
  misc_feature (960872)..(960873): n is a or c or g or t.
  misc_feature (960879)..(960879): n is a or c or g or t.
  misc_feature (960890)..(960890): n is a or c or g or t.
  misc_feature (1250239)..(1250239): n is a or c or g or t.
  misc_feature (1302432)..(1302434): n is a or c or g or t.
  misc_feature (1302471)..(1302471): n is a or c or g or t.
  misc_feature (1302488)..(1302488): n is a or c or g or t.
  misc_feature (1674836)..(1674836): n is a or c or g or t.
VNRMVKTEYEGIVKMLRFFVQTKNFSYVDRIGNALNPEPVEVALLEALRAFRSIRESASIEGDGRRYVEKDGNKIPMPGIPSDEEVKIFLDDVRSDMGVAKLVATLALAYPSKKENSGGDE

SEQ ID NO: 2093 - protein, 247 aa, Thermococcus kodakaraensis KOD1
  misc_feature (321437)..(321437): n is a or c or g or t.
  misc_feature (52783)..(527833): n is a or c or g or t.
  misc_feature (527901)..(527901): n is a or c or g or t.
  misc_feature (527978)..(527978): n is a or c or g or t.
  misc_feature (960838)..(960839): n is a or c or g or t.
  misc_feature (960860)..(960861): n is a or c or g or t.
  misc_feature (960872)..(960873): n is a or c or g or t.
  misc_feature (960879)..(960879): n is a or c or g or t.
  misc_feature (960890)..(960890): n is a or c or g or t.
  misc_feature (1250239)..(1250239): n is a or c or g or t.
  misc_feature (1302432)..(1302434): n is a or c or g or t.
  misc_feature (1302471)..(1302471): n is a or c or g or t.
  misc_feature (1302488)..(1302488): n is a or c or g or t.
  misc_feature (1674836)..(1674836): n is a or c or g or t.
VVPLTLFLKVQLRPTGIIALRALPQSKMRTALRYVPPTTLIGAISYPLLHISDDRGETIYEKKTFKSKAESVIGLFKWVTIKTEGRPKLYGSLLKINTIYRGKVQSAVTSFPFAVFYGESTNSLTAAYFVDEDALSESTYSAKDLERAAWGITRLGSRESIVSVEDVKMGKAVFREANKVRTAYAFPFKGVNVHGKGTLQAVVDWRLGIGDYSNAKRMVMFYPEETVEVEGGLSIVELDGEVVILAP

SEQ ID NO: 2094 - protein, 157 aa, Thermococcus kodakaraensis KOD1
  misc_feature (321437)..(321437): n is a or c or g or t.
  misc_feature (52783)..(527833): n is a or c or g or t.
  misc_feature (527901)..(527901): n is a or c or g or t.
  misc_feature (527978)..(527978): n is a or c or g or t.
  misc_feature (960838)..(960839): n is a or c or g or t.
  misc_feature (960860)..(960861): n is a or c or g or t.
  misc_feature (960872)..(960873): n is a or c or g or t.
  misc_feature (960879)..(960879): n is a or c or g or t.
  misc_feature (960890)..(960890): n is a or c or g or t.
  misc_feature (1250239)..(1250239): n is a or c or g or t.
  misc_feature (1302432)..(1302434): n is a or c or g or t.
  misc_feature (1302471)..(1302471): n is a or c or g or t.
  misc_feature (1302488)..(1302488): n is a or c or g or t.
  misc_feature (1674836)..(1674836): n is a or c or g or t.
MILEVPLNGEEIVTRISQAIKDNLTDDRLILAVLSGGMRPLIVSTLLALLNIEDVRVIVESDFENLSGHISLELGLFLAPSNRRWAKIICGFLEGKSVRKISEELGVSPATISNELKEMTKYGLVKAEKLDGRAPRYKATNAGRLYLKIKGENCHED

SEQ ID NO: 2095 - protein, 350 aa, Thermococcus kodakaraensis KOD1
  misc_feature (321437)..(321437): n is a or c or g or t.
  misc_feature (52783)..(527833): n is a or c or g or t.
  misc_feature (527901)..(527901): n is a or c or g or t.
  misc_feature (527978)..(527978): n is a or c or g or t.
  misc_feature (960838)..(960839): n is a or c or g or t.
  misc_feature (960860)..(960861): n is a or c or g or t.
  misc_feature (960872)..(960873): n is a or c or g or t.
  misc_feature (960879)..(960879): n is a or c or g or t.
  misc_feature (960890)..(960890): n is a or c or g or t.
  misc_feature (1250239)..(1250239): n is a or c or g or t.
  misc_feature (1302432)..(1302434): n is a or c or g or t.
  misc_feature (1302471)..(1302471): n is a or c or g or t.
  misc_feature (1302488)..(1302488): n is a or c or g or t.
  misc_feature (1674836)..(1674836): n is a or c or g or t.
MTKVQKGDVIRLKYTGRIKETGEIFDTTDEEIAKQAGIYKENGVYGPVPIAVGAGHVIQGLDEQLEGLEVGKKYEIEVPPEKGFGKRDPKLIKTFTLGQFRRQGLIPFPGMPVEIETEGGRKLRGRVLTVSGGRVRVDFNHPYAGKHLVYEVEVVEKIDDPIEKVKALIELRLPRLDANKVVIEVGEKDVVVDFTPVREEVDKGTLVLGELLLEGDLKFLGYEEVKFRPSVDELLKPPEAEEGEASEEEASETTEAPEETETEKAAEQEAIKEAPEEESEEKGETEESAEESEAEEASEKAEETEEKKPKKSTKSRKTRRTTRKKSTTKKKAKAAEENGEAEAENAEASE

SEQ ID NO: 2096 - protein, 431 aa, Thermococcus kodakaraensis KOD1
  misc_feature (321437)..(321437): n is a or c or g or t.
  misc_feature (52783)..(527833): n is a or c or g or t.
  misc_feature (527901)..(527901): n is a or c or g or t.
  misc_feature (527978)..(527978): n is a or c or g or t.
  misc_feature (960838)..(960839): n is a or c or g or t.
  misc_feature (960860)..(960861): n is a or c or g or t.
  misc_feature (960872)..(960873): n is a or c or g or t.
  misc_feature (960879)..(960879): n is a or c or g or t.
  misc_feature (960890)..(960890): n is a or c or g or t.
  misc_feature (1250239)..(1250239): n is a or c or g or t.
  misc_feature (1302432)..(1302434): n is a or c or g or t.
  misc_feature (1302471)..(1302471): n is a or c or g or t.
  misc_feature (1302488)..(1302488): n is a or c or g or t.
  misc_feature (1674836)..(1674836): n is a or c or g or t.
VMDMTQLEEARKGVVTEEMKFIAEREGIDAEKLRRNVAKGYTVIFRNVRHDWVKPVAVGAGVRVKVNANIGTSRDIVDVKAEIEKAKVAVKYGADTIMDLSTGGDLDEIRKTIMHAVDVPVGTVPIYQAAEEMLAKGKAIIEMSEEDMWRAVEKHFKDGVDYTTIHVGVTKEVVEKMKRTKRAVGMVSRGGTFLAAWILHWGEENPFYKDYDYLLELAREYDVVLSLGDGLRPGGLPDAGDELQIAELYTLGRLVRRAREAGVQTMVEGPGHVPIDQIAAQVKLAKVATDNAPFYVLGPIVTDIFPGYDHITAAIGGAIAALNGADFLCYVTPAEHLGLPDVEHVRQGVIAAKIAAHAVNLTRFEADFKKDYLMALARGKLNWARQFELSMDKERFVEIRKERPTKTEACSMCGDLCAIKLINDMLAGERK

SEQ ID NO: 2097 - protein, 198 aa, Thermococcus kodakaraensis KOD1
  misc_feature (321437)..(321437): n is a or c or g or t.
  misc_feature (52783)..(527833): n is a or c or g or t.
  misc_feature (527901)..(527901): n is a or c or g or t.
  misc_feature (527978)..(527978): n is a or c or g or t.
  misc_feature (960838)..(960839): n is a or c or g or t.
  misc_feature (960860)..(960861): n is a or c or g or t.
  misc_feature (960872)..(960873): n is a or c or g or t.
  misc_feature (960879)..(960879): n is a or c or g or t.
  misc_feature (960890)..(960890): n is a or c or g or t.
  misc_feature (1250239)..(1250239): n is a or c or g or t.
  misc_feature (1302432)..(1302434): n is a or c or g or t.
  misc_feature (1302471)..(1302471): n is a or c or g or t.
  misc_feature (1302488)..(1302488): n is a or c or g or t.
  misc_feature (1674836)..(1674836): n is a or c or g or t.
VRYVGRTLGIGLNNGKPFAFYLLCSRSFPNRRAVVKGNGVYILNQTETENPYVSYPVVRLMEDYAVVTNGLHTDFIAQALEWERPRKALVHVLDALDYERDDYSTPRIAGIIQHGGRRGWLGFVGRDMLWMRELELEEGKAFLTATYNMEGFESIELAFSTPEELAEKVMELPFEHKVLAIGIVENEKGWELSFTPSL

SEQ ID NO: 2098 - protein, 18 aa, Thermococcus kodakaraensis KOD1
  misc_feature (321437)..(321437): n is a or c or g or t.
  misc_feature (52783)..(527833): n is a or c or g or t.
  misc_feature (527901)..(527901): n is a or c or g or t.
  misc_feature (527978)..(527978): n is a or c or g or t.
  misc_feature (960838)..(960839): n is a or c or g or t.
  misc_feature (960860)..(960861): n is a or c or g or t.
  misc_feature (960872)..(960873): n is a or c or g or t.
  misc_feature (960879)..(960879): n is a or c or g or t.
  misc_feature (960890)..(960890): n is a or c or g or t.
  misc_feature (1250239)..(1250239): n is a or c or g or t.
  misc_feature (1302432)..(1302434): n is a or c or g or t.
  misc_feature (1302471)..(1302471): n is a or c or g or t.
  misc_feature (1302488)..(1302488): n is a or c or g or t.
  misc_feature (1674836)..(1674836): n is a or c or g or t.
MPMTIETNPETFMRAPVP

SEQ ID NO: 2099 - protein, 158 aa, Thermococcus kodakaraensis KOD1
  misc_feature (321437)..(321437): n is a or c or g or t.
  misc_feature (52783)..(527833): n is a or c or g or t.
  misc_feature (527901)..(527901): n is a or c or g or t.
  misc_feature (527978)..(527978): n is a or c or g or t.
  misc_feature (960838)..(960839): n is a or c or g or t.
  misc_feature (960860)..(960861): n is a or c or g or t.
  misc_feature (960872)..(960873): n is a or c or g or t.
  misc_feature (960879)..(960879): n is a or c or g or t.
  misc_feature (960890)..(960890): n is a or c or g or t.
  misc_feature (1250239)..(1250239): n is a or c or g or t.
  misc_feature (1302432)..(1302434): n is a or c or g or t.
  misc_feature (1302471)..(1302471): n is a or c or g or t.
  misc_feature (1302488)..(1302488): n is a or c or g or t.
  misc_feature (1674836)..(1674836): n is a or c or g or t.
VIHQNPWFSFTDNALSDMGSLKNPARWWFNGFLMVYALITLVPSIAAFRNGLSYLMPAAAIFLFLVGVFPEEKALHAPSAVLFYLLALTDIAIIGIKLWRSGVKFGYLWSALAVLTFFAMLYLTRVFKGLAIPELVGAATILAWFAYIGLLLLKGFKL

SEQ ID NO: 2100 - protein, 153 aa, Thermococcus kodakaraensis KOD1
  misc_feature (321437)..(321437): n is a or c or g or t.
  misc_feature (52783)..(527833): n is a or c or g or t.
  misc_feature (527901)..(527901): n is a or c or g or t.
  misc_feature (527978)..(527978): n is a or c or g or t.
  misc_feature (960838)..(960839): n is a or c or g or t.
  misc_feature (960860)..(960861): n is a or c or g or t.
  misc_feature (960872)..(960873): n is a or c or g or t.
  misc_feature (960879)..(960879): n is a or c or g or t.
  misc_feature (960890)..(960890): n is a or c or g or t.
  misc_feature (1250239)..(1250239): n is a or c or g or t.
  misc_feature (1302432)..(1302434): n is a or c or g or t.
  misc_feature (1302471)..(1302471): n is a or c or g or t.
  misc_feature (1302488)..(1302488): n is a or c or g or t.
  misc_feature (1674836)..(1674836): n is a or c or g or t.
VMAVSEEKANPRNEIGKTNDAELVKRLLIENYGYALDLIYLIRGNHQKVYARKPCPLDVGRNDGWLYFGRIESDGIRLTIEGSFLVGPKATKNVVELDDERARRYLAGESIEVDENLYGWFILKWRSYYLGSAKAKDGRLLNYVPKERRLRAE

SEQ ID NO: 2101 - protein, 170 aa, Thermococcus kodakaraensis KOD1
  misc_feature (321437)..(321437): n is a or c or g or t.
  misc_feature (52783)..(527833): n is a or c or g or t.
  misc_feature (527901)..(527901): n is a or c or g or t.
  misc_feature (527978)..(527978): n is a or c or g or t.
  misc_feature (960838)..(960839): n is a or c or g or t.
  misc_feature (960860)..(960861): n is a or c or g or t.
  misc_feature (960872)..(960873): n is a or c or g or t.
  misc_feature (960879)..(960879): n is a or c or g or t.
  misc_feature (960890)..(960890): n is a or c or g or t.
  misc_feature (1250239)..(1250239): n is a or c or g or t.
  misc_feature (1302432)..(1302434): n is a or c or g or t.
  misc_feature (1302471)..(1302471): n is a or c or g or t.
  misc_feature (1302488)..(1302488): n is a or c or g or t.
  misc_feature (1674836)..(1674836): n is a or c or g or t.
MYSVKKSKSGYIFDKPRERIAFMFLKDGTYFMYHDGRILCYSLKPVDVSREELEEFERTGEPPELIKRVKAGKYPENCVVKELPPIDKGLAQLNPNRKCVIIFTGFQDTVIDYVECNGETLAVARLIDEPGKVCRFAGKGNYKVAAVKLKRNEPCLTREEFLKKVEECRK

SEQ ID NO: 2102 - protein, 27 aa, Thermococcus kodakaraensis KOD1
  misc_feature (321437)..(321437): n is a or c or g or t.
  misc_feature (52783)..(527833): n is a or c or g or t.
  misc_feature (527901)..(527901): n is a or c or g or t.
  misc_feature (527978)..(527978): n is a or c or g or t.
  misc_feature (960838)..(960839): n is a or c or g or t.
  misc_feature (960860)..(960861): n is a or c or g or t.
  misc_feature (960872)..(960873): n is a or c or g or t.
  misc_feature (960879)..(960879): n is a or c or g or t.
  misc_feature (960890)..(960890): n is a or c or g or t.
  misc_feature (1250239)..(1250239): n is a or c or g or t.
  misc_feature (1302432)..(1302434): n is a or c or g or t.
  misc_feature (1302471)..(1302471): n is a or c or g or t.
  misc_feature (1302488)..(1302488): n is a or c or g or t.
  misc_feature (1674836)..(1674836): n is a or c or g or t.
MPIGTYIKVFLAFVVISKKIKCVQGHI

SEQ ID NO: 2103 - protein, 72 aa, Thermococcus kodakaraensis KOD1
  misc_feature (321437)..(321437): n is a or c or g or t.
  misc_feature (52783)..(527833): n is a or c or g or t.
  misc_feature (527901)..(527901): n is a or c or g or t.
  misc_feature (527978)..(527978): n is a or c or g or t.
  misc_feature (960838)..(960839): n is a or c or g or t.
  misc_feature (960860)..(960861): n is a or c or g or t.
  misc_feature (960872)..(960873): n is a or c or g or t.
  misc_feature (960879)..(960879): n is a or c or g or t.
  misc_feature (960890)..(960890): n is a or c or g or t.
  misc_feature (1250239)..(1250239): n is a or c or g or t.
  misc_feature (1302432)..(1302434): n is a or c or g or t.
  misc_feature (1302471)..(1302471): n is a or c or g or t.
  misc_feature (1302488)..(1302488): n is a or c or g or t.
  misc_feature (1674836)..(1674836): n is a or c or g or t.
VEPYWEFIRGEFGVNPSHIKDAMRFLEEIGELEIKRSADGKRLWVMTLRDIKRNPVKLDRWLSTSERPPTKW

SEQ ID NO: 2104 - protein, 152 aa, Thermococcus kodakaraensis KOD1
  misc_feature (321437)..(321437): n is a or c or g or t.
  misc_feature (52783)..(527833): n is a or c or g or t.
  misc_feature (527901)..(527901): n is a or c or g or t.
  misc_feature (527978)..(527978): n is a or c or g or t.
  misc_feature (960838)..(960839): n is a or c or g or t.
  misc_feature (960860)..(960861): n is a or c or g or t.
  misc_feature (960872)..(960873): n is a or c or g or t.
  misc_feature (960879)..(960879): n is a or c or g or t.
  misc_feature (960890)..(960890): n is a or c or g or t.
  misc_feature (1250239)..(1250239): n is a or c or g or t.
  misc_feature (1302432)..(1302434): n is a or c or g or t.
  misc_feature (1302471)..(1302471): n is a or c or g or t.
  misc_feature (1302488)..(1302488): n is a or c or g or t.
  misc_feature (1674836)..(1674836): n is a or c or g or t.
MIRAFIDTNVLLNVWFKEIDPRTSRPLWKASLRVLKLVEEGNIKGIVSIFTIMESVHVFRRKGADPKIAQSDIQDLGLEVYIPEIPALLDALTYQLELGVDPYDAVALSSAVNSNCDVLIARDEEFKKRGKGVIKIVSPEEFLSYLEERGLL

SEQ ID NO: 2105 - protein, 258 aa, Thermococcus kodakaraensis KOD1
  misc_feature (321437)..(321437): n is a or c or g or t.
  misc_feature (52783)..(527833): n is a or c or g or t.
  misc_feature (527901)..(527901): n is a or c or g or t.
  misc_feature (527978)..(527978): n is a or c or g or t.
  misc_feature (960838)..(960839): n is a or c or g or t.
  misc_feature (960860)..(960861): n is a or c or g or t.
  misc_feature (960872)..(960873): n is a or c or g or t.
  misc_feature (960879)..(960879): n is a or c or g or t.
  misc_feature (960890)..(960890): n is a or c or g or t.
  misc_feature (1250239)..(1250239): n is a or c or g or t.
  misc_feature (1302432)..(1302434): n is a or c or g or t.
  misc_feature (1302471)..(1302471): n is a or c or g or t.
  misc_feature (1302488)..(1302488): n is a or c or g or t.
  misc_feature (1674836)..(1674836): n is a or c or g or t.
VRNVKVDLNADLGESFGRYRLGLDEEVMKYITSANVATGWHAGDPLVMRKTVKLAKENGVAVGAHPGYPDLLGFGRRYMKLTYDEARNYILYQVGALYAFVRAEGIELQHVKPHGALYNALVKEEELARGVIEGIADFDKNLIFVTLSGSRPAEIAEEMGVKVAHEVFADRAYNPDGTLVPRSKPGAVIEDKEEIAERVISMVKDGGVRAINGEWVELKVDTICLHGDNPKAVEIAAHIRKVLEEEGVKIVPMKEIIR

SEQ ID NO: 2106 - protein, 62 aa, Thermococcus kodakaraensis KOD1
  misc_feature (321437)..(321437): n is a or c or g or t.
  misc_feature (52783)..(527833): n is a or c or g or t.
  misc_feature (527901)..(527901): n is a or c or g or t.
  misc_feature (527978)..(527978): n is a or c or g or t.
  misc_feature (960838)..(960839): n is a or c or g or t.
  misc_feature (960860)..(960861): n is a or c or g or t.
  misc_feature (960872)..(960873): n is a or c or g or t.
  misc_feature (960879)..(960879): n is a or c or g or t.
  misc_feature (960890)..(960890): n is a or c or g or t.
  misc_feature (1250239)..(1250239): n is a or c or g or t.
  misc_feature (1302432)..(1302434): n is a or c or g or t.
  misc_feature (1302471)..(1302471): n is a or c or g or t.
  misc_feature (1302488)..(1302488): n is a or c or g or t.
  misc_feature (1674836)..(1674836): n is a or c or g or t.
VTTEIAVLAGELRRDYGLSLGDAIIAATATVYGLTVATGNVKHFGRIKDLPVLVPPYRNSKG

SEQ ID NO: 2107 - protein, 331 aa, Thermococcus kodakaraensis KOD1
  misc_feature (321437)..(321437): n is a or c or g or t.
  misc_feature (52783)..(527833): n is a or c or g or t.
  misc_feature (527901)..(527901): n is a or c or g or t.
  misc_feature (527978)..(527978): n is a or c or g or t.
  misc_feature (960838)..(960839): n is a or c or g or t.
  misc_feature (960860)..(960861): n is a or c or g or t.
  misc_feature (960872)..(960873): n is a or c or g or t.
  misc_feature (960879)..(960879): n is a or c or g or t.
  misc_feature (960890)..(960890): n is a or c or g or t.
  misc_feature (1250239)..(1250239): n is a or c or g or t.
  misc_feature (1302432)..(1302434): n is a or c or g or t.
  misc_feature (1302471)..(1302471): n is a or c or g or t.
  misc_feature (1302488)..(1302488): n is a or c or g or t.
  misc_feature (1674836)..(1674836): n is a or c or g or t.
MIELLSVPSLLTVQDAGRTGYRKLGVPVSGFMDDFSARVANYLVGNPGDFPLLEFLLAGPKMRFNASVVFAVAGDVDVRINGTPIEPWTSYWAKRGDILEVGTLRSGLYGYIAFAGGVKCEKLLGSCSAYPRAGLGRPLKAGDRLSVGYALLTGREGCSLPRKLKPDYSGDSVEIRVVLGPDLEHFTENGIETFLSSAYVITPESDRMGYRLEGPVIEHSEKGPDIVTSPLVPGSIQVPGSGRPIVMMRDAQTTGGYAKIATVITADLPFLAQSRPGTEIMFKRVAPEEAREILKRREKTLEAIRKFLDGEMRAYSVRALGKEFLLFAGKI

SEQ ID NO: 2108 - protein, 510 aa, Thermococcus kodakaraensis KOD1
  misc_feature (321437)..(321437): n is a or c or g or t.
  misc_feature (52783)..(527833): n is a or c or g or t.
  misc_feature (527901)..(527901): n is a or c or g or t.
  misc_feature (527978)..(527978): n is a or c or g or t.
  misc_feature (960838)..(960839): n is a or c or g or t.
  misc_feature (960860)..(960861): n is a or c or g or t.
  misc_feature (960872)..(960873): n is a or c or g or t.
  misc_feature (960879)..(960879): n is a or c or g or t.
  misc_feature (960890)..(960890): n is a or c or g or t.
  misc_feature (1250239)..(1250239): n is a or c or g or t.
  misc_feature (1302432)..(1302434): n is a or c or g or t.
  misc_feature (1302471)..(1302471): n is a or c or g or t.
  misc_feature (1302488)..(1302488): n is a or c or g or t.
  misc_feature (1674836)..(1674836): n is a or c or g or t.
MPRRILLVTGKLAEPLVRKYGRGCDVFVAPVSVAAFLTPELIVRYLKKAGIKSEDYDFILIPGLVRGSAQIIEDELGIPAFKGPRNAMDLPQVLKALEEGFKLSKEVPADDLFSFDALKRVEDIRNRTKNKNYIEEALKKPWNALIGNLPAGRDFPARILAEVVDAPTLGVEKTVERALYYLREGADIIDIGMVAGERNLEFVDAIPEIREKLKEAGFEAPISFDSLNTSEIEGALDYADLFLSVDESNLEALVTEKPVVLIPTNQREGYFPTKPAERVKYLEKLKEKALDLGYKTIIPDLILEHVPHLARSVTAFQLYRERNPDDVLLAGVGNVVELYDADSVGMNALLAGIAKELSINLLLTTEVSAKAKGSVRELKRAVDMNLFDLPKDLGFDLLILKEKKEAEWRFEPANEVVEAQNRPVELEPVYFRIWVERGKIWVNAHKGTEAVLTIVGDEPNAIIDTVLERFEISPRHAFYLGRELERAYTALKLRRSYVQEVKLFREFYTE

SEQ ID NO: 2109 - protein, 362 aa, Thermococcus kodakaraensis KOD1
  misc_feature (321437)..(321437): n is a or c or g or t.
  misc_feature (52783)..(527833): n is a or c or g or t.
  misc_feature (527901)..(527901): n is a or c or g or t.
  misc_feature (527978)..(527978): n is a or c or g or t.
  misc_feature (960838)..(960839): n is a or c or g or t.
  misc_feature (960860)..(960861): n is a or c or g or t.
  misc_feature (960872)..(960873): n is a or c or g or t.
  misc_feature (960879)..(960879): n is a or c or g or t.
  misc_feature (960890)..(960890): n is a or c or g or t.
  misc_feature (1250239)..(1250239): n is a or c or g or t.
  misc_feature (1302432)..(1302434): n is a or c or g or t.
  misc_feature (1302471)..(1302471): n is a or c or g or t.
  misc_feature (1302488)..(1302488): n is a or c or g or t.
  misc_feature (1674836)..(1674836): n is a or c or g or t.
VTQMKTERAKEILLQLLKIPSPSGQEDRIMLHIMEFLHRLDYDVHIESDGEIIDLVVNPDAELFYEVHVDTIPIRAEPFVRGNIIYGTGASDIKGGAAAILLMMESLKKEGKDLNVGVVFVSDEELGGRGSALFMERYRPKMAVVLEPTDLEVHIAHAGNIEAYFEVDGKEAHGACPESGVNAIEETYKMLNELKNLEPFKQKGKYFDPHIGIQELLCENPVYLIPALCKGRLEARLLPDQEVEDVLDLMDPILDEYTLKYEYTEIWDGYELDPDEEIVQLAKAAMKKVGLDEFGGMRSWTDAINFMYNGTRTIVFGPGNLDISHTKYERIDVRDVVTASEFLKVLNDVYAEGLEKVEKELS

SEQ ID NO: 2110 - protein, 357 aa, Thermococcus kodakaraensis KOD1
  misc_feature (321437)..(321437): n is a or c or g or t.
  misc_feature (52783)..(527833): n is a or c or g or t.
  misc_feature (527901)..(527901): n is a or c or g or t.
  misc_feature (527978)..(527978): n is a or c or g or t.
  misc_feature (960838)..(960839): n is a or c or g or t.
  misc_feature (960860)..(960861): n is a or c or g or t.
  misc_feature (960872)..(960873): n is a or c or g or t.
  misc_feature (960879)..(960879): n is a or c or g or t.
  misc_feature (960890)..(960890): n is a or c or g or t.
  misc_feature (1250239)..(1250239): n is a or c or g or t.
  misc_feature (1302432)..(1302434): n is a or c or g or t.
  misc_feature (1302471)..(1302471): n is a or c or g or t.
  misc_feature (1302488)..(1302488): n is a or c or g or t.
  misc_feature (1674836)..(1674836): n is a or c or g or t.
MKLVHDPVHGYIELDEFARKLVDTPEFQRLRRITQLGFAFLAYPSARHTRFEHSLGTFHLAKKIRAHNPEIEEGALYAALLHDIGHYPFSHTLEGLYPRHEENTLWVIEHGSVGDVIKENYSTQEFKKLLKHPIVSGDIDADRMDYLVRDAYYTGAAYGVVDLERLVRNLKFDGKMLVVEEKGIMAAQNLLLSRAMMYPTVYFHHTAKIAEAMLRKAVEIEGISLEEIRIMDEIDLVSRLRSSEKPEVRELIRAIDDRKLYKRAYCSNRELDEKTISTLKRELQEEFGYSALLDYPPKPKYEERNAFVKIGSETKRLSEVSPLVRSLVEMKDVYWRWCVYAREDVREDVEAFPKKLF

SEQ ID NO: 2111 - protein, 93 aa, Thermococcus kodakaraensis KOD1
  misc_feature (321437)..(321437): n is a or c or g or t.
  misc_feature (52783)..(527833): n is a or c or g or t.
  misc_feature (527901)..(527901): n is a or c or g or t.
  misc_feature (527978)..(527978): n is a or c or g or t.
  misc_feature (960838)..(960839): n is a or c or g or t.
  misc_feature (960860)..(960861): n is a or c or g or t.
  misc_feature (960872)..(960873): n is a or c or g or t.
  misc_feature (960879)..(960879): n is a or c or g or t.
  misc_feature (960890)..(960890): n is a or c or g or t.
  misc_feature (1250239)..(1250239): n is a or c or g or t.
  misc_feature (1302432)..(1302434): n is a or c or g or t.
  misc_feature (1302471)..(1302471): n is a or c or g or t.
  misc_feature (1302488)..(1302488): n is a or c or g or t.
  misc_feature (1674836)..(1674836): n is a or c or g or t.
VRSMSEVVVTKDEILMYEKLKLISELAPIRERISEFERKYGVSFEEFERRIREENESFEAWDDYIEWKAYVRKFRELQKKLREIENAQRVRIA

SEQ ID NO: 2112 - protein, 366 aa, Thermococcus kodakaraensis KOD1
  misc_feature (321437)..(321437): n is a or c or g or t.
  misc_feature (52783)..(527833): n is a or c or g or t.
  misc_feature (527901)..(527901): n is a or c or g or t.
  misc_feature (527978)..(527978): n is a or c or g or t.
  misc_feature (960838)..(960839): n is a or c or g or t.
  misc_feature (960860)..(960861): n is a or c or g or t.
  misc_feature (960872)..(960873): n is a or c or g or t.
  misc_feature (960879)..(960879): n is a or c or g or t.
  misc_feature (960890)..(960890): n is a or c or g or t.
  misc_feature (1250239)..(1250239): n is a or c or g or t.
  misc_feature (1302432)..(1302434): n is a or c or g or t.
  misc_feature (1302471)..(1302471): n is a or c or g or t.
  misc_feature (1302488)..(1302488): n is a or c or g or t.
  misc_feature (1674836)..(1674836): n is a or c or g or t.
MAGETVSVQQIEPFEALHYTSEPVVTVAIEAKNVKDLPKLVEALRQLAKEDPTLHVKIDEETGQHLLSGMGELHLEVKLHRLKTEWKLDVEVSPPIVVYRESVTKQSPIVEGKSPNKHNRFYITVEPMPDEIYQAIREGEIPEGRPKDPKAVAKKLAELGMDYEIAKGIVDIYNGNMFLDNTKGIQYLNEVMDLLVDGFHQAMDEGPLAKEPVMKVIVRLHDAKIHEDNVHRGPAQIYPAIRSAIHCAMMKAGPVLYEPYQKVIINVPYEYMGAVSRELNQRRGQLIDMRQEGEVMIIIGEAPVAEMFGFAGAIRGATSGKALWTTEHAGFKRVPNELAQQIIRQIRQRKGLDPNPPKEQDVCPQQ

SEQ ID NO: 2113 - protein, 428 aa, Thermococcus kodakaraensis KOD1
  misc_feature (321437)..(321437): n is a or c or g or t.
  misc_feature (52783)..(527833): n is a or c or g or t.
  misc_feature (527901)..(527901): n is a or c or g or t.
  misc_feature (527978)..(527978): n is a or c or g or t.
  misc_feature (960838)..(960839): n is a or c or g or t.
  misc_feature (960860)..(960861): n is a or c or g or t.
  misc_feature (960872)..(960873): n is a or c or g or t.
  misc_feature (960879)..(960879): n is a or c or g or t.
  misc_feature (960890)..(960890): n is a or c or g or t.
  misc_feature (1250239)..(1250239): n is a or c or g or t.
  misc_feature (1302432)..(1302434): n is a or c or g or t.
  misc_feature (1302471)..(1302471): n is a or c or g or t.
  misc_feature (1302488)..(1302488): n is a or c or g or t.
  misc_feature (1674836)..(1674836): n is a or c or g or t.
MAKEKPHVNIVFIGHVDHGKSTTIGRLLFDTANIPENIIKKFEEMGEKGKSFKFAWVMDRLKEERERGITIDVAHTKFETPHRYITIIDAPGHRDFVKNMITGASQADAAVLVVAATDGVMPQTKEHAFLARTLGINHIIVAINKMDMVNYDEKKFKQVAEQVKKLLQMLGYKDFPIIPISAWEGDNVVKKSDKMPWYNGPTLLEALDQIPEPPKPVDKPLRIPIQDVYSIKGVGTVPVGRVETGVLRVGDVVIFEPASTIFHKPIQGEVKSIEMHHEPLQEAYPGDNIGFNVRGVGKNDIKRGDVAGHTTNPPTVVRPKDTFKAQIIVLNHPTAITVGYTPVLHAHTTQVAVRFEQLLAKLDPRTGNIVEENPQFIKTGDSAIVILRPTKAMVIEPVKEIPQMGRFAIRDMGQTVAAGMVISIQKAD

SEQ ID NO: 2114 - protein, 586 aa, Thermococcus kodakaraensis KOD1
  misc_feature (321437)..(321437): n is a or c or g or t.
  misc_feature (52783)..(527833): n is a or c or g or t.
  misc_feature (527901)..(527901): n is a or c or g or t.
  misc_feature (527978)..(527978): n is a or c or g or t.
  misc_feature (960838)..(960839): n is a or c or g or t.
  misc_feature (960860)..(960861): n is a or c or g or t.
  misc_feature (960872)..(960873): n is a or c or g or t.
  misc_feature (960879)..(960879): n is a or c or g or t.
  misc_feature (960890)..(960890): n is a or c or g or t.
  misc_feature (1250239)..(1250239): n is a or c or g or t.
  misc_feature (1302432)..(1302434): n is a or c or g or t.
  misc_feature (1302471)..(1302471): n is a or c or g or t.
  misc_feature (1302488)..(1302488): n is a or c or g or t.
  misc_feature (1674836)..(1674836): n is a or c or g or t.
VNPMKDRLKGPIANRELLIGISTGVLLASSMRVFVAGAYSSVEKTFFYNVMFPSVLGVVLFIIASAVVGKLNRRIGAAIVAAYALVSLLTDATEYTHLIAALAIPVALALLSELDIKYVTMGLVADLGLRVLAVGGEPLDFPHTRIILSLVVLFGAYALWKDEGKLPKPGFGLYAFAALLELGLMYPNAVLRYSGINSYYLPTFVGYSFIIALALLGGPYLARKPKIAPVLLILGTATLFVKPLSLIGLPLALTSAVALVESAKTIRKGELGAIYLFLVVTLALGAYIGRDIGLAFMEDKLEALIVVASIVYAVVTYGKNAPISTPNRKEVVSVLAGLALVSVIVLALFNTGPSYAESKKDVLIWSYNIHQGFGPYRGTFNGYELVKLLREHEPDIIASQEVVGGMIANGYQDVPLMLSAYLGYAYEYKPAVEGTYGIAIFSHWRMNTEGELNLKSVGQARPAQKVMIEELGITLVNVHMGLSEEERAMQAEELLSFAESEPAAHVILGDTNAEPDEKAIQIITQEYKDAFEERPPYTFNWGDIDIENIDYILLRRGWPAKVKDYGCLCEVEVSDHRPVWALIELP

SEQ ID NO: 2115 - protein, 302 aa, Thermococcus kodakaraensis KOD1
  misc_feature (321437)..(321437): n is a or c or g or t.
  misc_feature (52783)..(527833): n is a or c or g or t.
  misc_feature (527901)..(527901): n is a or c or g or t.
  misc_feature (527978)..(527978): n is a or c or g or t.
  misc_feature (960838)..(960839): n is a or c or g or t.
  misc_feature (960860)..(960861): n is a or c or g or t.
  misc_feature (960872)..(960873): n is a or c or g or t.
  misc_feature (960879)..(960879): n is a or c or g or t.
  misc_feature (960890)..(960890): n is a or c or g or t.
  misc_feature (1250239)..(1250239): n is a or c or g or t.
  misc_feature (1302432)..(1302434): n is a or c or g or t.
  misc_feature (1302471)..(1302471): n is a or c or g or t.
  misc_feature (1302488)..(1302488): n is a or c or g or t.
  misc_feature (1674836)..(1674836): n is a or c or g or t.
MEKEKLIEEINRLKEERNAIIMAHNYQLPEIQDIADFLGDSLELARKAVNIDADVIVFAGVDFMAETAKILNPEKTVLLPTPRATCAMANMLTIKHIIEAKKKYPDAPVVLYVNSSAEAKAYADVTVTSANAAKIVGKLDSDVVIFGPDKNLAHYVAKVTGKKVIPVPPNGHCYVHRKFTLEDVERARKLYPNAKLMVHPECEPEVQEQADIIVSTGGMIKRACEHDEWVVFTEREMVCRLQKLYPSKKFYPAREDATCIGMKAITLNHIYESLRDMKYRVEVPAEIAEKARKAIERMLEMS

SEQ ID NO: 2116 - protein, 33 aa, Thermococcus kodakaraensis KOD1
  misc_feature (321437)..(321437): n is a or c or g or t.
  misc_feature (52783)..(527833): n is a or c or g or t.
  misc_feature (527901)..(527901): n is a or c or g or t.
  misc_feature (527978)..(527978): n is a or c or g or t.
  misc_feature (960838)..(960839): n is a or c or g or t.
  misc_feature (960860)..(960861): n is a or c or g or t.
  misc_feature (960872)..(960873): n is a or c or g or t.
  misc_feature (960879)..(960879): n is a or c or g or t.
  misc_feature (960890)..(960890): n is a or c or g or t.
  misc_feature (1250239)..(1250239): n is a or c or g or t.
  misc_feature (1302432)..(1302434): n is a or c or g or t.
  misc_feature (1302471)..(1302471): n is a or c or g or t.
  misc_feature (1302488)..(1302488): n is a or c or g or t.
  misc_feature (1674836)..(1674836): n is a or c or g or t.
MGLALFLLVSAILPTALITSTGIIFELTPLILS

SEQ ID NO: 2117 - protein, 163 aa, Thermococcus kodakaraensis KOD1
  misc_feature (321437)..(321437): n is a or c or g or t.
  misc_feature (52783)..(527833): n is a or c or g or t.
  misc_feature (527901)..(527901): n is a or c or g or t.
  misc_feature (527978)..(527978): n is a or c or g or t.
  misc_feature (960838)..(960839): n is a or c or g or t.
  misc_feature (960860)..(960861): n is a or c or g or t.
  misc_feature (960872)..(960873): n is a or c or g or t.
  misc_feature (960879)..(960879): n is a or c or g or t.
  misc_feature (960890)..(960890): n is a or c or g or t.
  misc_feature (1250239)..(1250239): n is a or c or g or t.
  misc_feature (1302432)..(1302434): n is a or c or g or t.
  misc_feature (1302471)..(1302471): n is a or c or g or t.
  misc_feature (1302488)..(1302488): n is a or c or g or t.
  misc_feature (1674836)..(1674836): n is a or c or g or t.
MPLLKIGFNLTVLLVAITSMVPLGEVAGTVYAKITGLHRIDGMIAVSIMTIFFGTLNVLLLSYNIDAVRILDKTVAVLLFFGTVIEAFGIMRSNVSPIWKYSGYIVSWIVGLFGVYYLAVSIKEHNYVSIIVVLAIFLLVIASNKPIKNRMRITRRRQYFNYR

SEQ ID NO: 2118 - protein, 187 aa, Thermococcus kodakaraensis KOD1
  misc_feature (321437)..(321437): n is a or c or g or t.
  misc_feature (52783)..(527833): n is a or c or g or t.
  misc_feature (527901)..(527901): n is a or c or g or t.
  misc_feature (527978)..(527978): n is a or c or g or t.
  misc_feature (960838)..(960839): n is a or c or g or t.
  misc_feature (960860)..(960861): n is a or c or g or t.
  misc_feature (960872)..(960873): n is a or c or g or t.
  misc_feature (960879)..(960879): n is a or c or g or t.
  misc_feature (960890)..(960890): n is a or c or g or t.
  misc_feature (1250239)..(1250239): n is a or c or g or t.
  misc_feature (1302432)..(1302434): n is a or c or g or t.
  misc_feature (1302471)..(1302471): n is a or c or g or t.
  misc_feature (1302488)..(1302488): n is a or c or g or t.
  misc_feature (1674836)..(1674836): n is a or c or g or t.
MRVLELAKNRKTVRKFLPDKPPKEDILKAIEAAKEAPSGMNAQPWKFVIIDDHWLKAKIREVCEEVEKKFHEKVSGELGEWLKEKGFTPEKPFLSEAPYLILVFGHTKAPYWLQSTWTAIGYLLLALEELGLGTVTYTPPNPKPVEELLNVPKDYKLQTILPVGYPADPKPKYERKKLEDVVSFNGF

SEQ ID NO: 2119 - protein, 361 aa, Thermococcus kodakaraensis KOD1
  misc_feature (321437)..(321437): n is a or c or g or t.
  misc_feature (52783)..(527833): n is a or c or g or t.
  misc_feature (527901)..(527901): n is a or c or g or t.
  misc_feature (527978)..(527978): n is a or c or g or t.
  misc_feature (960838)..(960839): n is a or c or g or t.
  misc_feature (960860)..(960861): n is a or c or g or t.
  misc_feature (960872)..(960873): n is a or c or g or t.
  misc_feature (960879)..(960879): n is a or c or g or t.
  misc_feature (960890)..(960890): n is a or c or g or t.
  misc_feature (1250239)..(1250239): n is a or c or g or t.
  misc_feature (1302432)..(1302434): n is a or c or g or t.
  misc_feature (1302471)..(1302471): n is a or c or g or t.
  misc_feature (1302488)..(1302488): n is a or c or g or t.
  misc_feature (1674836)..(1674836): n is a or c or g or t.
MVLDSTLREGEQTPGVNFSPEDRLRIGIALDEVGVDFIEAGHPAVSGEILEGIRLLASHGLNANILAHSRALRSDIDLVLKAEAEWIGIFMCLSQRCLERRFRTDLSGALTRVEDAILYAKDHGLKIRFTPEDTTRTEWKNLTAALNLARELKVDRVSIADTTGAAHPLEFYDLVKRVVEFGIPVNVHCHNDLGLALANAIMGIEAGATLVDATVNGIGERAGIVDLSHLLAALYYHYGVKKYRLEKLYSLSRLVSEITGLQVQVNYPIVGQNAFTHKAGLHVSAVVRDPSFYEFLPAETFGRERTIYVDRFAGRETIRFHLSRFGIHDEEIIEELLRRVKASRRPFTPEMLAEEARRMMT

SEQ ID NO: 2120 - protein, 347 aa, Thermococcus kodakaraensis KOD1
  misc_feature (321437)..(321437): n is a or c or g or t.
  misc_feature (52783)..(527833): n is a or c or g or t.
  misc_feature (527901)..(527901): n is a or c or g or t.
  misc_feature (527978)..(527978): n is a or c or g or t.
  misc_feature (960838)..(960839): n is a or c or g or t.
  misc_feature (960860)..(960861): n is a or c or g or t.
  misc_feature (960872)..(960873): n is a or c or g or t.
  misc_feature (960879)..(960879): n is a or c or g or t.
  misc_feature (960890)..(960890): n is a or c or g or t.
  misc_feature (1250239)..(1250239): n is a or c or g or t.
  misc_feature (1302432)..(1302434): n is a or c or g or t.
  misc_feature (1302471)..(1302471): n is a or c or g or t.
  misc_feature (1302488)..(1302488): n is a or c or g or t.
  misc_feature (1674836)..(1674836): n is a or c or g or t.
VYRVAVIPGDGIGPEVIDGAVRVLKAVTGRVRFEYYEGGVDVFQECGSPIREEDLEEIRRSDAVLFGATTTPFDLPGYRSLILTLRKELGLYANLRIIPDLRTGREIVIVRENSEGLYFGIGAVVNGRAVDVRLITREGAERIARFAVEQAKARGSFITFVHKANVLTGDKFFRRIVREVAGEEGVEVRDAIIDSFTIKLVRNPWEHGVILSENLFGDILSDLATVHAGSIGIVPSGNYGDGIALFEPVHGSAPDIAGKGIANPIGAILSGAMLLDYLGLDGSLIRAAVRGYVVNGELTPDMGGRARTEDVVRGIIGEIEDLLSMDEVWRDEIRLSRLESDISRMAG

SEQ ID NO: 2121 - protein, 276 aa, Thermococcus kodakaraensis KOD1
  misc_feature (321437)..(321437): n is a or c or g or t.
  misc_feature (52783)..(527833): n is a or c or g or t.
  misc_feature (527901)..(527901): n is a or c or g or t.
  misc_feature (527978)..(527978): n is a or c or g or t.
  misc_feature (960838)..(960839): n is a or c or g or t.
  misc_feature (960860)..(960861): n is a or c or g or t.
  misc_feature (960872)..(960873): n is a or c or g or t.
  misc_feature (960879)..(960879): n is a or c or g or t.
  misc_feature (960890)..(960890): n is a or c or g or t.
  misc_feature (1250239)..(1250239): n is a or c or g or t.
  misc_feature (1302432)..(1302434): n is a or c or g or t.
  misc_feature (1302471)..(1302471): n is a or c or g or t.
  misc_feature (1302488)..(1302488): n is a or c or g or t.
  misc_feature (1674836)..(1674836): n is a or c or g or t.
VVVMRIGITYTVLRREEMAIKERAGEFGEVVMLHEDDLLFPGNYDLDVVIIRNVSHFKALYTARLFESEGIPTVNSSRLIFEAGDKLFATLRLAGKVPVPEWKAALSEGGALRVPDSLGYPLVSKPVFGSWGRLLAKVNDRDSLEAVLEHRKWMKNPLYGIHYFQEFVEKPGRDIRSYVIGGEFVGAIYRYSNHWITNTARGGKAEPCSDPEVEELSVKAWEAFGEGALAIDIFESEKGLLVNEVNPNMEFKNAARVTGADMAGKLVEYAVEVAKT

SEQ ID NO: 2122 - protein, 145 aa, Thermococcus kodakaraensis KOD1
  misc_feature (321437)..(321437): n is a or c or g or t.
  misc_feature (52783)..(527833): n is a or c or g or t.
  misc_feature (527901)..(527901): n is a or c or g or t.
  misc_feature (527978)..(527978): n is a or c or g or t.
  misc_feature (960838)..(960839): n is a or c or g or t.
  misc_feature (960860)..(960861): n is a or c or g or t.
  misc_feature (960872)..(960873): n is a or c or g or t.
  misc_feature (960879)..(960879): n is a or c or g or t.
  misc_feature (960890)..(960890): n is a or c or g or t.
  misc_feature (1250239)..(1250239): n is a or c or g or t.
  misc_feature (1302432)..(1302434): n is a or c or g or t.
  misc_feature (1302471)..(1302471): n is a or c or g or t.
  misc_feature (1302488)..(1302488): n is a or c or g or t.
  misc_feature (1674836)..(1674836): n is a or c or g or t.
VELHAYERDFDFYGEMVINLRTPPGYNPPKGWEILDFVPAYQVDRRSPLVRAFVRGIRRNGMRPRLKKKTGTADMNILGPRFGVDAVAYGPGDSRLDHTPHERISLSEYLLAIDVLVDVIEELKGAKERAAEESGEREAGKALSG

SEQ ID NO: 2123 - protein, 219 aa, Thermococcus kodakaraensis KOD1
  misc_feature (321437)..(321437): n is a or c or g or t.
  misc_feature (52783)..(527833): n is a or c or g or t.
  misc_feature (527901)..(527901): n is a or c or g or t.
  misc_feature (527978)..(527978): n is a or c or g or t.
  misc_feature (960838)..(960839): n is a or c or g or t.
  misc_feature (960860)..(960861): n is a or c or g or t.
  misc_feature (960872)..(960873): n is a or c or g or t.
  misc_feature (960879)..(960879): n is a or c or g or t.
  misc_feature (960890)..(960890): n is a or c or g or t.
  misc_feature (1250239)..(1250239): n is a or c or g or t.
  misc_feature (1302432)..(1302434): n is a or c or g or t.
  misc_feature (1302471)..(1302471): n is a or c or g or t.
  misc_feature (1302488)..(1302488): n is a or c or g or t.
  misc_feature (1674836)..(1674836): n is a or c or g or t.
MSEALDPRTKLQSMLQPVNNFHLESSETCLEILSAVLEEKGEKDVVILSKGHSAPAFYVMLHEMGLLSDEELYSFADIDGLPSHVIRGLPFIEVSSGSLGQGLSVANGIAMAKRMDGEEGYVYVILGDGELDEGQVWEAAMTASHHRLDRVIAIVDRNYFQLTGGTEEILSKEPLADKWRAFGWEVMGVPNRKEELKKALETAKKLGGRPKVIIARWEV

SEQ ID NO: 2124 - protein, 381 aa, Thermococcus kodakaraensis KOD1
  misc_feature (321437)..(321437): n is a or c or g or t.
  misc_feature (52783)..(527833): n is a or c or g or t.
  misc_feature (527901)..(527901): n is a or c or g or t.
  misc_feature (527978)..(527978): n is a or c or g or t.
  misc_feature (960838)..(960839): n is a or c or g or t.
  misc_feature (960860)..(960861): n is a or c or g or t.
  misc_feature (960872)..(960873): n is a or c or g or t.
  misc_feature (960879)..(960879): n is a or c or g or t.
  misc_feature (960890)..(960890): n is a or c or g or t.
  misc_feature (1250239)..(1250239): n is a or c or g or t.
  misc_feature (1302432)..(1302434): n is a or c or g or t.
  misc_feature (1302471)..(1302471): n is a or c or g or t.
  misc_feature (1302488)..(1302488): n is a or c or g or t.
  misc_feature (1674836)..(1674836): n is a or c or g or t.
MERDNIERGRRGRSEVRALGEGRGERLVHRGLPHGAGGARMEGLSFGPLSILPSLAEELNPHRVAFLTNTTVERLWLEKAAEGIEEPIRIVIPDGEKYKSLETAVAIWKRLQEEGFTRKSLLIGLGGGVVTDIAGFVASTYMRGTLLGLVPTTLLAQVDAAIGGKTGVNFNGKNMIGTFYLPNFVLIAHETLSTLPEEEIRNGLGEVAKYALLDRKVYALARNFEGISETLIRECALFKVEVVEKDLGESGLRRILNLGHTAGHAIEKLSNYRIKHGLAVSMGLMVASKVGEELYGFDSGKTEELLKKLGLPTGHPFRAEEILEEMRLDKKAWYGRITFVIPVEIGDVVVEEVDEAVLKRALEATRDDSGSGDCQKPGGSA

SEQ ID NO: 2125 - protein, 355 aa, Thermococcus kodakaraensis KOD1
  misc_feature (321437)..(321437): n is a or c or g or t.
  misc_feature (52783)..(527833): n is a or c or g or t.
  misc_feature (527901)..(527901): n is a or c or g or t.
  misc_feature (527978)..(527978): n is a or c or g or t.
  misc_feature (960838)..(960839): n is a or c or g or t.
  misc_feature (960860)..(960861): n is a or c or g or t.
  misc_feature (960872)..(960873): n is a or c or g or t.
  misc_feature (960879)..(960879): n is a or c or g or t.
  misc_feature (960890)..(960890): n is a or c or g or t.
  misc_feature (1250239)..(1250239): n is a or c or g or t.
  misc_feature (1302432)..(1302434): n is a or c or g or t.
  misc_feature (1302471)..(1302471): n is a or c or g or t.
  misc_feature (1302488)..(1302488): n is a or c or g or t.
  misc_feature (1674836)..(1674836): n is a or c or g or t.
MRGKLLSFSLFGESHGKAVGVLVEGLPPGIEVSVEELKRELERRKGIERFATKRKETDEPKILSGVFRGRTTGTPVAVIVENRDVDSSYYEEIRNTPRPGHADYPAGIKYFGYNDYRGGGHFSGRLTVGVVIAGYFAKKLLEREGIKVRAYLKRIGRVEAHVSPEELLSSENPYCPDEGAFEAMVEEMERARKAGDSVGGIVEAVAFNVPPGLGGPWEEDIEADIASALFRIPAVKGVEFGLGFGLAELRGSQANDPFVLKDGKVVTETNNHGGVLGGMTTGMPLVVRAAFKPTPSIYLPQRTVDLGRMEEVTLKLRGRFDSCIVPKALPVVESSVAFVIADHLLRRRAWEGMVR

SEQ ID NO: 2126 - protein, 58 aa, Thermococcus kodakaraensis KOD1
  misc_feature (321437)..(321437): n is a or c or g or t.
  misc_feature (52783)..(527833): n is a or c or g or t.
  misc_feature (527901)..(527901): n is a or c or g or t.
  misc_feature (527978)..(527978): n is a or c or g or t.
  misc_feature (960838)..(960839): n is a or c or g or t.
  misc_feature (960860)..(960861): n is a or c or g or t.
  misc_feature (960872)..(960873): n is a or c or g or t.
  misc_feature (960879)..(960879): n is a or c or g or t.
  misc_feature (960890)..(960890): n is a or c or g or t.
  misc_feature (1250239)..(1250239): n is a or c or g or t.
  misc_feature (1302432)..(1302434): n is a or c or g or t.
  misc_feature (1302471)..(1302471): n is a or c or g or t.
  misc_feature (1302488)..(1302488): n is a or c or g or t.
  misc_feature (1674836)..(1674836): n is a or c or g or t.
MEVAKAIGEAKLKLEMPVYDPDREREVLSRAGEFRRVFEAILEVSRDVQRLRVFQQDK

SEQ ID NO: 2127 - protein, 256 aa, Thermococcus kodakaraensis KOD1
  misc_feature (321437)..(321437): n is a or c or g or t.
  misc_feature (52783)..(527833): n is a or c or g or t.
  misc_feature (527901)..(527901): n is a or c or g or t.
  misc_feature (527978)..(527978): n is a or c or g or t.
  misc_feature (960838)..(960839): n is a or c or g or t.
  misc_feature (960860)..(960861): n is a or c or g or t.
  misc_feature (960872)..(960873): n is a or c or g or t.
  misc_feature (960879)..(960879): n is a or c or g or t.
  misc_feature (960890)..(960890): n is a or c or g or t.
  misc_feature (1250239)..(1250239): n is a or c or g or t.
  misc_feature (1302432)..(1302434): n is a or c or g or t.
  misc_feature (1302471)..(1302471): n is a or c or g or t.
  misc_feature (1302488)..(1302488): n is a or c or g or t.
  misc_feature (1674836)..(1674836): n is a or c or g or t.
MRIGIAGYGRMGRLFERCLGGRFEVIFYSEHGRSDVGSLEELYLKSDVIMVASSLDTVPKRLERLAEISREHGGKKIVFDIATFKSRVVEAYAGFGEETRVASVHPMFGPGAKTIEGKRFITVPIPGREKDAEEVADFIRSIGGNVSFLDWKTHDRLMGFVIGVPYFIGLSYLSLSRELGLEEFGGTSWAFLETYGKAVLHDSPDFIREVLSMSREQIEEFLDFMRKNPPDPERLREKLEWEEIEEAYERFYRALE

SEQ ID NO: 2128 - protein, 312 aa, Thermococcus kodakaraensis KOD1
  misc_feature (321437)..(321437): n is a or c or g or t.
  misc_feature (52783)..(527833): n is a or c or g or t.
  misc_feature (527901)..(527901): n is a or c or g or t.
  misc_feature (527978)..(527978): n is a or c or g or t.
  misc_feature (960838)..(960839): n is a or c or g or t.
  misc_feature (960860)..(960861): n is a or c or g or t.
  misc_feature (960872)..(960873): n is a or c or g or t.
  misc_feature (960879)..(960879): n is a or c or g or t.
  misc_feature (960890)..(960890): n is a or c or g or t.
  misc_feature (1250239)..(1250239): n is a or c or g or t.
  misc_feature (1302432)..(1302434): n is a or c or g or t.
  misc_feature (1302471)..(1302471): n is a or c or g or t.
  misc_feature (1302488)..(1302488): n is a or c or g or t.
  misc_feature (1674836)..(1674836): n is a or c or g or t.
MKRYSFGFETVPVALVDDLLIGSVHDGRNYKILLARVMGEEILETHFLSGKNDWEGHSIARIEGGYMIGGAAEGKATSDGGVGWKAYVARLDEDLNVLWERKIEIRGNEATYSILPAGDSIFIAGDTGRPRNMGFFSGKFSMEGELEWLKDFGNWEEVVTASLLSRERPRLIGSVKEERWKVVAFDFDSDGNFLDRATITEEGIALTAALWNDKLILAGYKENDLWVWSKEWEVTLPNGAATSPLPLGDGLLVGGEVEGTASVMELSPNGEVLWKKSLWERGWVEVLGKDLAAGVKEEDGKTVMMVESIGEW

SEQ ID NO: 2129 - protein, 86 aa, Thermococcus kodakaraensis KOD1
  misc_feature (321437)..(321437): n is a or c or g or t.
  misc_feature (52783)..(527833): n is a or c or g or t.
  misc_feature (527901)..(527901): n is a or c or g or t.
  misc_feature (527978)..(527978): n is a or c or g or t.
  misc_feature (960838)..(960839): n is a or c or g or t.
  misc_feature (960860)..(960861): n is a or c or g or t.
  misc_feature (960872)..(960873): n is a or c or g or t.
  misc_feature (960879)..(960879): n is a or c or g or t.
  misc_feature (960890)..(960890): n is a or c or g or t.
  misc_feature (1250239)..(1250239): n is a or c or g or t.
  misc_feature (1302432)..(1302434): n is a or c or g or t.
  misc_feature (1302471)..(1302471): n is a or c or g or t.
  misc_feature (1302488)..(1302488): n is a or c or g or t.
  misc_feature (1674836)..(1674836): n is a or c or g or t.
MGEVTVVIPSDLSRILRVDEKQLPKLVRIYLAVELYREGVVSLGKAAEIAGVTKAEMMEILASKGVPLNYTEEDLQEDIETLERLL

SEQ ID NO: 2130 - protein, 383 aa, Thermococcus kodakaraensis KOD1
  misc_feature (321437)..(321437): n is a or c or g or t.
  misc_feature (52783)..(527833): n is a or c or g or t.
  misc_feature (527901)..(527901): n is a or c or g or t.
  misc_feature (527978)..(527978): n is a or c or g or t.
  misc_feature (960838)..(960839): n is a or c or g or t.
  misc_feature (960860)..(960861): n is a or c or g or t.
  misc_feature (960872)..(960873): n is a or c or g or t.
  misc_feature (960879)..(960879): n is a or c or g or t.
  misc_feature (960890)..(960890): n is a or c or g or t.
  misc_feature (1250239)..(1250239): n is a or c or g or t.
  misc_feature (1302432)..(1302434): n is a or c or g or t.
  misc_feature (1302471)..(1302471): n is a or c or g or t.
  misc_feature (1302488)..(1302488): n is a or c or g or t.
  misc_feature (1674836)..(1674836): n is a or c or g or t.
VSEMIERKQILEVLEGYEKDKIKVGVIGSHSALDIADGAKAEGFKTIVVAQRGRHRTYAEYFKEKKTRDGLTKGFIDDVIVLEKFGQIIEVQEELRKRNVIFVPNRSFVVYTGIDRVENEFLVPLFGSRNLLRSEERSEEKSYYWLLEKAGLPYPEPVKPEEIDEVGLVIVKLPHAKKRLERGFFTAASYREFREKSERLMKLGVITEEDLAKARIERYIIGPVFNFDFFYSPLDEEIELLGIDWRFETSLDGHVRLPASQQLTLPEWQFEPEYTVTGHASSTLRESLLEKVFDMAEKYVEATKRYYPPGIIGPFTLQTAVDKDLNFYIYDVAPRTGGGTNIHMAMGHPYGNALWRKEMSTGRRVALEIKRAIELDELEKVVT

SEQ ID NO: 2131 - protein, 498 aa, Thermococcus kodakaraensis KOD1
  misc_feature (321437)..(321437): n is a or c or g or t.
  misc_feature (52783)..(527833): n is a or c or g or t.
  misc_feature (527901)..(527901): n is a or c or g or t.
  misc_feature (527978)..(527978): n is a or c or g or t.
  misc_feature (960838)..(960839): n is a or c or g or t.
  misc_feature (960860)..(960861): n is a or c or g or t.
  misc_feature (960872)..(960873): n is a or c or g or t.
  misc_feature (960879)..(960879): n is a or c or g or t.
  misc_feature (960890)..(960890): n is a or c or g or t.
  misc_feature (1250239)..(1250239): n is a or c or g or t.
  misc_feature (1302432)..(1302434): n is a or c or g or t.
  misc_feature (1302471)..(1302471): n is a or c or g or t.
  misc_feature (1302488)..(1302488): n is a or c or g or t.
  misc_feature (1674836)..(1674836): n is a or c or g or t.
MFVRSLSAGGSVNEIGNKAHRLSILARYFNVPTGFVVTTRAYDLWKEEGKLPQEVVEEVKDYFTSPYLLEGEFPVVVRSSATVEDSSKASFAGVFESVTGINSFNDLIEGIERVFKSASSKRVRTYMERMGLSGQSRMAAIVQREITPEFAGVLFTRSSTEPEKALVEFVRGSGEELVGGRKSAERVLLPRNPEEVNDELMRELLTVGLEVESLFGRPQDIEWAYDGTLWILQSRDITVLGQNREAGDIKTENWYALKGIPASPGVARGRARFVLDDQPPEEAEMIFGEGEVLVTYVLHAEHYNLFAKAAGIVTKVDSILSHPAIIARELGIPCVVGVDVEAIRDGDEVIVDGNKGAVYVRNPKRVLKGVELWKSSYREDETVRELKEEYLKALEKLSSEELENVIVGAFSLVREHYLMDREKAFNVYYFINWLMEEETPRLLAKRFDVIDIFSRADRGEKPRTNEEERLFEIYRLLKAFINYTDERVRDIPRLLFGV

SEQ ID NO: 2132 - protein, 486 aa, Thermococcus kodakaraensis KOD1
  misc_feature (321437)..(321437): n is a or c or g or t.
  misc_feature (52783)..(527833): n is a or c or g or t.
  misc_feature (527901)..(527901): n is a or c or g or t.
  misc_feature (527978)..(527978): n is a or c or g or t.
  misc_feature (960838)..(960839): n is a or c or g or t.
  misc_feature (960860)..(960861): n is a or c or g or t.
  misc_feature (960872)..(960873): n is a or c or g or t.
  misc_feature (960879)..(960879): n is a or c or g or t.
  misc_feature (960890)..(960890): n is a or c or g or t.
  misc_feature (1250239)..(1250239): n is a or c or g or t.
  misc_feature (1302432)..(1302434): n is a or c or g or t.
  misc_feature (1302471)..(1302471): n is a or c or g or t.
  misc_feature (1302488)..(1302488): n is a or c or g or t.
  misc_feature (1674836)..(1674836): n is a or c or g or t.
MGKFEQKLVNALKGYTFDDVLLIPQATEVEPKDVDVSTQITPNVRLNIPILSAAMDTVTEWEMAVAMAREGGLGVIHRNMSIEEQVEQVKRVKRAERFIVEDVISIKPDESLDYALFLMERNGVDGLPVVDDEGRVVGVITKKDIAAKQGSKVSEVMTGEVITVPETVTAEEAVQIMFDHRIDRLPVVDGEGRLVGIITMSDLAKRRKYRNAVRDENGDLLVAAAVGPFDLERAKALDNAGADVIVVDTAHAHNLKAIKAMKEIRNAVDADLIVGNIANPKAVDDLTFADAVKVGIGPGSICTTRVVAGVGVPQITAIALVADKAQEYGLHVIADGGIRYSGDIVKAIAAGADAVMLGSLLAGTKEAPGKEVVMNGRRYKQYRGMGSLGAMMKGGAERYYQKGHMKTKKFVPEGVEGVVPYKGPVGEVLYQLIGGLRAGMGYVGARNIPELKEKGEFVIITHAGYIESHPHDILITNEAPNYPLGK

SEQ ID NO: 2133 - protein, 310 aa, Thermococcus kodakaraensis KOD1
  misc_feature (321437)..(321437): n is a or c or g or t.
  misc_feature (52783)..(527833): n is a or c or g or t.
  misc_feature (527901)..(527901): n is a or c or g or t.
  misc_feature (527978)..(527978): n is a or c or g or t.
  misc_feature (960838)..(960839): n is a or c or g or t.
  misc_feature (960860)..(960861): n is a or c or g or t.
  misc_feature (960872)..(960873): n is a or c or g or t.
  misc_feature (960879)..(960879): n is a or c or g or t.
  misc_feature (960890)..(960890): n is a or c or g or t.
  misc_feature (1250239)..(1250239): n is a or c or g or t.
  misc_feature (1302432)..(1302434): n is a or c or g or t.
  misc_feature (1302471)..(1302471): n is a or c or g or t.
  misc_feature (1302488)..(1302488): n is a or c or g or t.
  misc_feature (1674836)..(1674836): n is a or c or g or t.
VVLMWENFIEEKVKEIRETVGDGKAIIALSGGVDSSTAAVLAHRAIGDRLHAVFVNTGFMRKGEPEFVVKTFRDEFGLNLHYVDASERFFRELKGVTDPEEKRKIIGRVFIEVFEEVAKEINADFLIQGTIAPDWIESHGKIKSHHNVGGLPERLNLKLIEPLRDLYKDEVRELAKELGLPEKIYNRMPFPGPGLAVRVLGEVTPERVAIVREANAIVEEEIEKAGLKPWQAFAVLLGVKTVGVQGDIRAYKETVAVRVVESLDGMTANAMNVPWEVLQRIAFRITSEIPEVGRVLYDITNKPPATIEFE

SEQ ID NO: 2134 - protein, 72 aa, Thermococcus kodakaraensis KOD1
  misc_feature (321437)..(321437): n is a or c or g or t.
  misc_feature (52783)..(527833): n is a or c or g or t.
  misc_feature (527901)..(527901): n is a or c or g or t.
  misc_feature (527978)..(527978): n is a or c or g or t.
  misc_feature (960838)..(960839): n is a or c or g or t.
  misc_feature (960860)..(960861): n is a or c or g or t.
  misc_feature (960872)..(960873): n is a or c or g or t.
  misc_feature (960879)..(960879): n is a or c or g or t.
  misc_feature (960890)..(960890): n is a or c or g or t.
  misc_feature (1250239)..(1250239): n is a or c or g or t.
  misc_feature (1302432)..(1302434): n is a or c or g or t.
  misc_feature (1302471)..(1302471): n is a or c or g or t.
  misc_feature (1302488)..(1302488): n is a or c or g or t.
  misc_feature (1674836)..(1674836): n is a or c or g or t.
MGENVEVVEAVYENGVLKPLKPLKLKEGEHLVIKLYRKDIVEKTEKFRKIISPENFKESPEEYLQKLREERL

SEQ ID NO: 2135 - protein, 345 aa, Thermococcus kodakaraensis KOD1
  misc_feature (321437)..(321437): n is a or c or g or t.
  misc_feature (52783)..(527833): n is a or c or g or t.
  misc_feature (527901)..(527901): n is a or c or g or t.
  misc_feature (527978)..(527978): n is a or c or g or t.
  misc_feature (960838)..(960839): n is a or c or g or t.
  misc_feature (960860)..(960861): n is a or c or g or t.
  misc_feature (960872)..(960873): n is a or c or g or t.
  misc_feature (960879)..(960879): n is a or c or g or t.
  misc_feature (960890)..(960890): n is a or c or g or t.
  misc_feature (1250239)..(1250239): n is a or c or g or t.
  misc_feature (1302432)..(1302434): n is a or c or g or t.
  misc_feature (1302471)..(1302471): n is a or c or g or t.
  misc_feature (1302488)..(1302488): n is a or c or g or t.
  misc_feature (1674836)..(1674836): n is a or c or g or t.
MYKKYENIYKPRRLYLSLPGGGCMAVVKEVLEIAEKIKNMEIRGAGKIARSAAYALQLQAEKSKATNVDEFWKEMKQAAKILFETRPTAVSLPNALRYVMHRGKIAYSSGADLEQLRFVIINAAKEFIHNSEKALERIGEFGAKRIEDGDVIMTHCHSKAAISVMKTAWEQGKDIKVIVTETRPKWQGKITAKELASYGIPVIYVVDSAARHYMKMTDKVVMGADSITVNGAVINKIGTALIALTAKEHRVWTMIAAETYKFHPETMLGQLVEIEMRDPTEVIPEDELKTWPKNIEVWNPAFDVTPPEYVDVIITERGIIPPYAAIDILREEFGWALKYTEPWED

SEQ ID NO: 2136 - protein, 229 aa, Thermococcus kodakaraensis KOD1
  misc_feature (321437)..(321437): n is a or c or g or t.
  misc_feature (52783)..(527833): n is a or c or g or t.
  misc_feature (527901)..(527901): n is a or c or g or t.
  misc_feature (527978)..(527978): n is a or c or g or t.
  misc_feature (960838)..(960839): n is a or c or g or t.
  misc_feature (960860)..(960861): n is a or c or g or t.
  misc_feature (960872)..(960873): n is a or c or g or t.
  misc_feature (960879)..(960879): n is a or c or g or t.
  misc_feature (960890)..(960890): n is a or c or g or t.
  misc_feature (1250239)..(1250239): n is a or c or g or t.
  misc_feature (1302432)..(1302434): n is a or c or g or t.
  misc_feature (1302471)..(1302471): n is a or c or g or t.
  misc_feature (1302488)..(1302488): n is a or c or g or t.
  misc_feature (1674836)..(1674836): n is a or c or g or t.
VIKMKVKKHRFPGVYIVIDDDGSEKIATKNLVPGQRVYGERVVKFEGEEYRIWNPTRSKLGAAILNGLKNFPIKPGSTVLYLGVASGTTASHVSDIVGWEGKVFGVEFSPRVLRELVPLVEERRNIVPILGDATKPEGYRALVPKVDVIFEDVAQPTQAKILIDNAKVYLKSGGYGMISVKSRSIDVTKEPEQVFKEVEKELSTYFEVVERLSLEPYEKDHALFVVRKP

SEQ ID NO: 2137 - protein, 391 aa, Thermococcus kodakaraensis KOD1
  misc_feature (321437)..(321437): n is a or c or g or t.
  misc_feature (52783)..(527833): n is a or c or g or t.
  misc_feature (527901)..(527901): n is a or c or g or t.
  misc_feature (527978)..(527978): n is a or c or g or t.
  misc_feature (960838)..(960839): n is a or c or g or t.
  misc_feature (960860)..(960861): n is a or c or g or t.
  misc_feature (960872)..(960873): n is a or c or g or t.
  misc_feature (960879)..(960879): n is a or c or g or t.
  misc_feature (960890)..(960890): n is a or c or g or t.
  misc_feature (1250239)..(1250239): n is a or c or g or t.
  misc_feature (1302432)..(1302434): n is a or c or g or t.
  misc_feature (1302471)..(1302471): n is a or c or g or t.
  misc_feature (1302488)..(1302488): n is a or c or g or t.
  misc_feature (1674836)..(1674836): n is a or c or g or t.
VVEMEKPVIIGVGMVPVGEHWRVSLRDMAVEALLNAMDDAGIDKVDSLYVGNMASGSFIEQENLGALIADWAGLGNIPAVKVEAACGSGGAAVQEGAKAVMAGLEDIVAVVGVEKMTDAWPSDATRYLAYAADAEYELFHGASFVALNALIMRLYMKTYGYTEEDLAHFAVNAHANGAKNPYAMFKRPITVDTVLKSPYVADPLKLFDAAPMCDGAAAVIITSKEKAKELGVPKDKMVELAGFWRAIDTINFANREDFLTLKAAKVAAEKAYKMAGVTAKDIDFFEVHDAFTVMAALSLEALGVAEKGKGAMLAKEGQIAIDGDYPIQTMGGLKARGHPVGATGVYQTVEAVLQLRGEAPEGIQVPDAEVGLTQNIGGTGSNITVNVLRRV

SEQ ID NO: 2138 - protein, 391 aa, Thermococcus kodakaraensis KOD1
  misc_feature (321437)..(321437): n is a or c or g or t.
  misc_feature (52783)..(527833): n is a or c or g or t.
  misc_feature (527901)..(527901): n is a or c or g or t.
  misc_feature (527978)..(527978): n is a or c or g or t.
  misc_feature (960838)..(960839): n is a or c or g or t.
  misc_feature (960860)..(960861): n is a or c or g or t.
  misc_feature (960872)..(960873): n is a or c or g or t.
  misc_feature (960879)..(960879): n is a or c or g or t.
  misc_feature (960890)..(960890): n is a or c or g or t.
  misc_feature (1250239)..(1250239): n is a or c or g or t.
  misc_feature (1302432)..(1302434): n is a or c or g or t.
  misc_feature (1302471)..(1302471): n is a or c or g or t.
  misc_feature (1302488)..(1302488): n is a or c or g or t.
  misc_feature (1674836)..(1674836): n is a or c or g or t.
VVDIRVLILAIDRDDDFGKKAGVKGPVIGRAACLDAAVKLSLADPEDSDANVLYAAIKLYDKLKEKGEFDDVEVALITGHPKVGLKSDMELARQLDEVLKVFPADGVIPVTDGAEDEQIFPIIASKVPIITSHRVVVKQSPGIETTWYIIVKYMKEILSDPEVAKVVFGIPGLIVLLYGLSKIVGVWYPQSEKIVSTVISGTVLLIIGGLFFTKGFNLDIGGALAAFRRAVVEQFVVVLSFVAGILIIVSGAINAYLNLESYSLQLIGSYPGTSLLATLIYLNAISGTITIGIAVMIAGKVLHAYLRRDYHIWYYISALLMTPALWVTLDLTTRYALSIFTVSDIEVFQKLLLGILDVGLAVLAGAYLRGKVKGWMNVENGRRTQKVSAKA

SEQ ID NO: 2139 - protein, 51 aa, Thermococcus kodakaraensis KOD1
  misc_feature (321437)..(321437): n is a or c or g or t.
  misc_feature (52783)..(527833): n is a or c or g or t.
  misc_feature (527901)..(527901): n is a or c or g or t.
  misc_feature (527978)..(527978): n is a or c or g or t.
  misc_feature (960838)..(960839): n is a or c or g or t.
  misc_feature (960860)..(960861): n is a or c or g or t.
  misc_feature (960872)..(960873): n is a or c or g or t.
  misc_feature (960879)..(960879): n is a or c or g or t.
  misc_feature (960890)..(960890): n is a or c or g or t.
  misc_feature (1250239)..(1250239): n is a or c or g or t.
  misc_feature (1302432)..(1302434): n is a or c or g or t.
  misc_feature (1302471)..(1302471): n is a or c or g or t.
  misc_feature (1302488)..(1302488): n is a or c or g or t.
  misc_feature (1674836)..(1674836): n is a or c or g or t.
VAQGVQLTGRAKVTEIDPDWKWAYALVEYIDPDTGKKARVYARIPHYWPPG

SEQ ID NO: 2140 - protein, 231 aa, Thermococcus kodakaraensis KOD1
  misc_feature (321437)..(321437): n is a or c or g or t.
  misc_feature (52783)..(527833): n is a or c or g or t.
  misc_feature (527901)..(527901): n is a or c or g or t.
  misc_feature (527978)..(527978): n is a or c or g or t.
  misc_feature (960838)..(960839): n is a or c or g or t.
  misc_feature (960860)..(960861): n is a or c or g or t.
  misc_feature (960872)..(960873): n is a or c or g or t.
  misc_feature (960879)..(960879): n is a or c or g or t.
  misc_feature (960890)..(960890): n is a or c or g or t.
  misc_feature (1250239)..(1250239): n is a or c or g or t.
  misc_feature (1302432)..(1302434): n is a or c or g or t.
  misc_feature (1302471)..(1302471): n is a or c or g or t.
  misc_feature (1302488)..(1302488): n is a or c or g or t.
  misc_feature (1674836)..(1674836): n is a or c or g or t.
VTNSSAVVLVTLTLENATPSPGCWVDSLTFRGKLFLNLTDGYYYINGSKLGRPTFFILPYNLPERKSLLYKASILKRYGFTVVGDLKVNNVTFAQDKLVHTFVRTFRPPLVRIRSNWLPIIYQKKGYLSSFIGFESLYDLNTGIAIDIDSPYPELYAAGIMFVAPFNYYSAEINDKIDFSREYWPYEFVLYKTNIRFPEDRTGTRPDTALKYYMLFGVGALVVSLIRRWKR

SEQ ID NO: 2141 - protein, 258 aa, Thermococcus kodakaraensis KOD1
  misc_feature (321437)..(321437): n is a or c or g or t.
  misc_feature (52783)..(527833): n is a or c or g or t.
  misc_feature (527901)..(527901): n is a or c or g or t.
  misc_feature (527978)..(527978): n is a or c or g or t.
  misc_feature (960838)..(960839): n is a or c or g or t.
  misc_feature (960860)..(960861): n is a or c or g or t.
  misc_feature (960872)..(960873): n is a or c or g or t.
  misc_feature (960879)..(960879): n is a or c or g or t.
  misc_feature (960890)..(960890): n is a or c or g or t.
  misc_feature (1250239)..(1250239): n is a or c or g or t.
  misc_feature (1302432)..(1302434): n is a or c or g or t.
  misc_feature (1302471)..(1302471): n is a or c or g or t.
  misc_feature (1302488)..(1302488): n is a or c or g or t.
  misc_feature (1674836)..(1674836): n is a or c or g or t.
MGRFKEQLKWELEDPYVALIFVFSFLLLAVTFYTNLFDIDTNVMTMGLGTAREHAAAGTAMLFPGLSDKSTAIFAITGVLLTSLAIRYDRDTGVAKSVYSLPLRNYKVVLAKFIAVFVVLFLSAFSAALVAYLYSYGDSPTMIKEGMLGQRYLLIHILYWLEAALYVSSLSSMIAVLSPGTFAAILGGITVMYVPEILGWDFLPPRILNDGLIKAHAVFWDPWEKLGIFFNTTFYPCLLLPLVVLSLTLVLSEWRDVS

SEQ ID NO: 2142 - protein, 741 aa, Thermococcus kodakaraensis KOD1
  misc_feature (321437)..(321437): n is a or c or g or t.
  misc_feature (52783)..(527833): n is a or c or g or t.
  misc_feature (527901)..(527901): n is a or c or g or t.
  misc_feature (527978)..(527978): n is a or c or g or t.
  misc_feature (960838)..(960839): n is a or c or g or t.
  misc_feature (960860)..(960861): n is a or c or g or t.
  misc_feature (960872)..(960873): n is a or c or g or t.
  misc_feature (960879)..(960879): n is a or c or g or t.
  misc_feature (960890)..(960890): n is a or c or g or t.
  misc_feature (1250239)..(1250239): n is a or c or g or t.
  misc_feature (1302432)..(1302434): n is a or c or g or t.
  misc_feature (1302471)..(1302471): n is a or c or g or t.
  misc_feature (1302488)..(1302488): n is a or c or g or t.
  misc_feature (1674836)..(1674836): n is a or c or g or t.
MVVKDCPECHGTGKVKVGEKECPVCEGWGYVPADFKIGDKLKGYRNLDHLGVEDEVDEIPCPECHGKGTVPVYDTCPTCGGTGKVLACDICGKIKGPWEPGMETTWVCPDCLRKYKVVYILDKTCDYEDVEVGSLYKGTIDRVERFGVFVKLNPHVTGLIKRKDLLGGREYKPGDEIVVQVLDVRPDKREVDLIESALKHYKTVVVRKELPVTPIAELSKDMAGKTVRIQGRITQVQVTGGPTVFTITDGTGITWVAAFEAPGVRAYPNINVGDIVEVIGKVAFHSGEIQIEASDMARLWGPDAARVKQQIEAELDRRAQPEDVGFLVESEVLEKLKPKIMKAAFMIRRAILEGRPILLRHHADADGYTSGLALEYAIVPLIEKISPDPQARWKLFKRRPSRAPFYELEDVLKDIIFMVEDHEKFGDPLPLVVIVDNGGTSEDIPAYKRIRAYGVPIVVIDHHDPREWVSEDKAKVDDYVDVHVNPHHVKRGYYELTAGMLATEVARFINPEVEDKIKHLPAIAGTGDKSKAPEFYQYLEIAKKAKGLTEEDLKKIAEVIDHEAYFWKFMDGHGIIDEILLLTGNLQRHRELINAIYPEVKEKQEKALRASLPHVKSVVLPNGVRFNTIDVELFAPKFSYPSPGKLSGLIHDHFKEKYGEDSPILTLAYGPDFAVVRASDGMAAYGFDLNEIIPKLQEKLPSAGIEGGGHSYAGSIKFFEGMRKEVLEEFAKEVVKLKKIS

SEQ ID NO: 2143 - protein, 96 aa, Thermococcus kodakaraensis KOD1
  misc_feature (321437)..(321437): n is a or c or g or t.
  misc_feature (52783)..(527833): n is a or c or g or t.
  misc_feature (527901)..(527901): n is a or c or g or t.
  misc_feature (527978)..(527978): n is a or c or g or t.
  misc_feature (960838)..(960839): n is a or c or g or t.
  misc_feature (960860)..(960861): n is a or c or g or t.
  misc_feature (960872)..(960873): n is a or c or g or t.
  misc_feature (960879)..(960879): n is a or c or g or t.
  misc_feature (960890)..(960890): n is a or c or g or t.
  misc_feature (1250239)..(1250239): n is a or c or g or t.
  misc_feature (1302432)..(1302434): n is a or c or g or t.
  misc_feature (1302471)..(1302471): n is a or c or g or t.
  misc_feature (1302488)..(1302488): n is a or c or g or t.
  misc_feature (1674836)..(1674836): n is a or c or g or t.
MVTVMRGDLIRILSSVEEKANELKLEGFEPDVVLVGKEAYEFIKEQVNEEFGGEEEVFELSGLRVRILEELGGDAVVVDTKALGYAPATRRFKVVP

SEQ ID NO: 2144 - protein, 23 aa, Thermococcus kodakaraensis KOD1
  misc_feature (321437)..(321437): n is a or c or g or t.
  misc_feature (52783)..(527833): n is a or c or g or t.
  misc_feature (527901)..(527901): n is a or c or g or t.
  misc_feature (527978)..(527978): n is a or c or g or t.
  misc_feature (960838)..(960839): n is a or c or g or t.
  misc_feature (960860)..(960861): n is a or c or g or t.
  misc_feature (960872)..(960873): n is a or c or g or t.
  misc_feature (960879)..(960879): n is a or c or g or t.
  misc_feature (960890)..(960890): n is a or c or g or t.
  misc_feature (1250239)..(1250239): n is a or c or g or t.
  misc_feature (1302432)..(1302434): n is a or c or g or t.
  misc_feature (1302471)..(1302471): n is a or c or g or t.
  misc_feature (1302488)..(1302488): n is a or c or g or t.
  misc_feature (1674836)..(1674836): n is a or c or g or t.
MFYIITLIITFFVLYSMASRMMF

SEQ ID NO: 2145 - protein, 157 aa, Thermococcus kodakaraensis KOD1
  misc_feature (321437)..(321437): n is a or c or g or t.
  misc_feature (52783)..(527833): n is a or c or g or t.
  misc_feature (527901)..(527901): n is a or c or g or t.
  misc_feature (527978)..(527978): n is a or c or g or t.
  misc_feature (960838)..(960839): n is a or c or g or t.
  misc_feature (960860)..(960861): n is a or c or g or t.
  misc_feature (960872)..(960873): n is a or c or g or t.
  misc_feature (960879)..(960879): n is a or c or g or t.
  misc_feature (960890)..(960890): n is a or c or g or t.
  misc_feature (1250239)..(1250239): n is a or c or g or t.
  misc_feature (1302432)..(1302434): n is a or c or g or t.
  misc_feature (1302471)..(1302471): n is a or c or g or t.
  misc_feature (1302488)..(1302488): n is a or c or g or t.
  misc_feature (1674836)..(1674836): n is a or c or g or t.
MSWTTPKRAFIGAATAEGGTKLNAFDNALLKLGIGNVNLVKLSSVIPAHIEWMEKVHDVPIGMLLPTVYAHIESDEPGMTISAALGVGISKNNEGGLIYEYSGYCTKEEAEEMVRKMVEEGFRQRGWELGEFKVASAEITVKDKPAAAIAVVVMFPY

SEQ ID NO: 2146 - protein, 177 aa, Thermococcus kodakaraensis KOD1
  misc_feature (321437)..(321437): n is a or c or g or t.
  misc_feature (52783)..(527833): n is a or c or g or t.
  misc_feature (527901)..(527901): n is a or c or g or t.
  misc_feature (527978)..(527978): n is a or c or g or t.
  misc_feature (960838)..(960839): n is a or c or g or t.
  misc_feature (960860)..(960861): n is a or c or g or t.
  misc_feature (960872)..(960873): n is a or c or g or t.
  misc_feature (960879)..(960879): n is a or c or g or t.
  misc_feature (960890)..(960890): n is a or c or g or t.
  misc_feature (1250239)..(1250239): n is a or c or g or t.
  misc_feature (1302432)..(1302434): n is a or c or g or t.
  misc_feature (1302471)..(1302471): n is a or c or g or t.
  misc_feature (1302488)..(1302488): n is a or c or g or t.
  misc_feature (1674836)..(1674836): n is a or c or g or t.
MATEYISGLIMVAVMARNPIAGILAVILGVTMIFDRVAYYAVYPLFWVMKSVERLDKMYKGWREAKGGSSVLLAILVGVSMVFSNATTLFLVGKSVGVQISYGEAFKGVLYSTFLGGVLGTPGGIGANELGVTIAIGNGAAQIVTAFLYKTLTTYLYALVGAIAFYRVVAAGRPEDY

SEQ ID NO: 2147 - protein, 205 aa, Thermococcus kodakaraensis KOD1
  misc_feature (321437)..(321437): n is a or c or g or t.
  misc_feature (52783)..(527833): n is a or c or g or t.
  misc_feature (527901)..(527901): n is a or c or g or t.
  misc_feature (527978)..(527978): n is a or c or g or t.
  misc_feature (960838)..(960839): n is a or c or g or t.
  misc_feature (960860)..(960861): n is a or c or g or t.
  misc_feature (960872)..(960873): n is a or c or g or t.
  misc_feature (960879)..(960879): n is a or c or g or t.
  misc_feature (960890)..(960890): n is a or c or g or t.
  misc_feature (1250239)..(1250239): n is a or c or g or t.
  misc_feature (1302432)..(1302434): n is a or c or g or t.
  misc_feature (1302471)..(1302471): n is a or c or g or t.
  misc_feature (1302488)..(1302488): n is a or c or g or t.
  misc_feature (1674836)..(1674836): n is a or c or g or t.
VSEMKEYNIVITGVGGQGILTAANLLGWAALRAGYKVRVGEVHGMSQRFGSVIAYVRFGEDVYGAMVPEGKADVILSFEPVEALRYINYLKKGGLVFTNARPIPPVQVSMGLATYPTLDEMKKIVEEDFGGKFMAFDAEKLAMEAGNIVTTNVVLIGALSQTPGFPLSEEQIKEVIRISVPPKTIDVNMRAFELGVKAAKEMLGL

SEQ ID NO: 2148 - protein, 148 aa, Thermococcus kodakaraensis KOD1
  misc_feature (321437)..(321437): n is a or c or g or t.
  misc_feature (52783)..(527833): n is a or c or g or t.
  misc_feature (527901)..(527901): n is a or c or g or t.
  misc_feature (527978)..(527978): n is a or c or g or t.
  misc_feature (960838)..(960839): n is a or c or g or t.
  misc_feature (960860)..(960861): n is a or c or g or t.
  misc_feature (960872)..(960873): n is a or c or g or t.
  misc_feature (960879)..(960879): n is a or c or g or t.
  misc_feature (960890)..(960890): n is a or c or g or t.
  misc_feature (1250239)..(1250239): n is a or c or g or t.
  misc_feature (1302432)..(1302434): n is a or c or g or t.
  misc_feature (1302471)..(1302471): n is a or c or g or t.
  misc_feature (1302488)..(1302488): n is a or c or g or t.
  misc_feature (1674836)..(1674836): n is a or c or g or t.
MCQKLRPGENMRNTIVLVRADNFQKASVALADLVRYGGMKIRGDPRIIPPALSEWVFEKVSGEKPRRKFKAHVIAQIDLPPRKAIGRLMDIHPPAHVLVVPPDSEAWTELMRLWGTFEKLRGFHPPKRTKAEEIERKRKKREYEDLDL

SEQ ID NO: 2149 - protein, 268 aa, Thermococcus kodakaraensis KOD1
  misc_feature (321437)..(321437): n is a or c or g or t.
  misc_feature (52783)..(527833): n is a or c or g or t.
  misc_feature (527901)..(527901): n is a or c or g or t.
  misc_feature (527978)..(527978): n is a or c or g or t.
  misc_feature (960838)..(960839): n is a or c or g or t.
  misc_feature (960860)..(960861): n is a or c or g or t.
  misc_feature (960872)..(960873): n is a or c or g or t.
  misc_feature (960879)..(960879): n is a or c or g or t.
  misc_feature (960890)..(960890): n is a or c or g or t.
  misc_feature (1250239)..(1250239): n is a or c or g or t.
  misc_feature (1302432)..(1302434): n is a or c or g or t.
  misc_feature (1302471)..(1302471): n is a or c or g or t.
  misc_feature (1302488)..(1302488): n is a or c or g or t.
  misc_feature (1674836)..(1674836): n is a or c or g or t.
VVIEMVLYFIGLGLYDEKDITLKGLETARRCDKVFAEFYTSLLAGTTLEKIEELIGKPIVRLSREDVELNFERIVLPEAKDKDVAFLTAGDPMVATTHSDLRIRAKKAGVKSYVIHAPSIYSAVAITGLQIYKFGKSATVAYPEKNWFPTSHYDVIRDNKERGLHTLLFLDIKADQNRYMTANEAMEILLKVEEMKGEGVFTPETLVVVLARAGSLEPTLRAGYVRELINEDFGRQPHVLIVPGRLHIVEAEYLVEFAGAPEKILEEV

SEQ ID NO: 2150 - protein, 34 aa, Thermococcus kodakaraensis KOD1
  misc_feature (321437)..(321437): n is a or c or g or t.
  misc_feature (52783)..(527833): n is a or c or g or t.
  misc_feature (527901)..(527901): n is a or c or g or t.
  misc_feature (527978)..(527978): n is a or c or g or t.
  misc_feature (960838)..(960839): n is a or c or g or t.
  misc_feature (960860)..(960861): n is a or c or g or t.
  misc_feature (960872)..(960873): n is a or c or g or t.
  misc_feature (960879)..(960879): n is a or c or g or t.
  misc_feature (960890)..(960890): n is a or c or g or t.
  misc_feature (1250239)..(1250239): n is a or c or g or t.
  misc_feature (1302432)..(1302434): n is a or c or g or t.
  misc_feature (1302471)..(1302471): n is a or c or g or t.
  misc_feature (1302488)..(1302488): n is a or c or g or t.
  misc_feature (1674836)..(1674836): n is a or c or g or t.
MYILWYPARGVHLKKVAKFCTFPGALAVIFSTSL

SEQ ID NO: 2151 - protein, 225 aa, Thermococcus kodakaraensis KOD1
  misc_feature (321437)..(321437): n is a or c or g or t.
  misc_feature (52783)..(527833): n is a or c or g or t.
  misc_feature (527901)..(527901): n is a or c or g or t.
  misc_feature (527978)..(527978): n is a or c or g or t.
  misc_feature (960838)..(960839): n is a or c or g or t.
  misc_feature (960860)..(960861): n is a or c or g or t.
  misc_feature (960872)..(960873): n is a or c or g or t.
  misc_feature (960879)..(960879): n is a or c or g or t.
  misc_feature (960890)..(960890): n is a or c or g or t.
  misc_feature (1250239)..(1250239): n is a or c or g or t.
  misc_feature (1302432)..(1302434): n is a or c or g or t.
  misc_feature (1302471)..(1302471): n is a or c or g or t.
  misc_feature (1302488)..(1302488): n is a or c or g or t.
  misc_feature (1674836)..(1674836): n is a or c or g or t.
MIRPAYGGEAMNGNEEGDGLIEFYASEALTCPRRIYFRLKGYPQKWPEFVRVRLNQGINTHQILGQILQERFGVELEKHLVLRSSKLGFEIHGRIDAFKDFPIEIKGKTSLPKVPYDYHLAQLNVYLRWAEAEYGYLYYIKLHEEPMKIINKLDISSFPVIKGPNFRVFEVPYDKSLFKETLRHFYKVKKAYENDRLPEGWKSYACRFCPYRHICYPDRDWEDSE

SEQ ID NO: 2152 - protein, 217 aa, Thermococcus kodakaraensis KOD1
  misc_feature (321437)..(321437): n is a or c or g or t.
  misc_feature (52783)..(527833): n is a or c or g or t.
  misc_feature (527901)..(527901): n is a or c or g or t.
  misc_feature (527978)..(527978): n is a or c or g or t.
  misc_feature (960838)..(960839): n is a or c or g or t.
  misc_feature (960860)..(960861): n is a or c or g or t.
  misc_feature (960872)..(960873): n is a or c or g or t.
  misc_feature (960879)..(960879): n is a or c or g or t.
  misc_feature (960890)..(960890): n is a or c or g or t.
  misc_feature (1250239)..(1250239): n is a or c or g or t.
  misc_feature (1302432)..(1302434): n is a or c or g or t.
  misc_feature (1302471)..(1302471): n is a or c or g or t.
  misc_feature (1302488)..(1302488): n is a or c or g or t.
  misc_feature (1674836)..(1674836): n is a or c or g or t.
MLRGVIFDVDETLVYYEGYDPKKWFEEWVKRELEKHGINLDYELYSKTARLELPRTYVKKLGIDPVELWKIIDAANNRYRKKMLAERKIKAFPDVLALEELKKLNLKLAAVSNASLGNTLLVLRAFDLNKYFDLVLGKDYSNLDGVKPNPYLIQKALRMLNLRPEEAIVVGDSSNDVLAAHGAGVNAVNMIRFGKVEGADYYVKDLWELVELVKGML

SEQ ID NO: 2153 - protein, 334 aa, Thermococcus kodakaraensis KOD1
  misc_feature (321437)..(321437): n is a or c or g or t.
  misc_feature (52783)..(527833): n is a or c or g or t.
  misc_feature (527901)..(527901): n is a or c or g or t.
  misc_feature (527978)..(527978): n is a or c or g or t.
  misc_feature (960838)..(960839): n is a or c or g or t.
  misc_feature (960860)..(960861): n is a or c or g or t.
  misc_feature (960872)..(960873): n is a or c or g or t.
  misc_feature (960879)..(960879): n is a or c or g or t.
  misc_feature (960890)..(960890): n is a or c or g or t.
  misc_feature (1250239)..(1250239): n is a or c or g or t.
  misc_feature (1302432)..(1302434): n is a or c or g or t.
  misc_feature (1302471)..(1302471): n is a or c or g or t.
  misc_feature (1302488)..(1302488): n is a or c or g or t.
  misc_feature (1674836)..(1674836): n is a or c or g or t.
MRVVNMEEFTFRCERCGAPLEVSPETIIAVCPYCGYPNHISGNIKTENIYIVPSLDKNAIAQSFWKRVEKDFDLRRIKDDIQIVGIEGHYAPYWAGKVHVEGTVRYMKREQECHTDSKGNTHCHTVERHYTERVNENLSLLGSARRQVKSLGVEDMVKHFSKSRPKEKKLLDLDEESWSKIKLEILNTEMDELHAKLMMREDAVDVIRNRFLAKSDRIERFDIHASEPENVRLILLPLWTIYYRYSNSIFQTVFAGWDGKAVAATEPMNLFRRAEYLAGAGVGALIAAFGGALVSTSPVFGILVMVGGAALGWVAGSKALEGQRVEREGSLGVI

SEQ ID NO: 2154 - protein, 337 aa, Thermococcus kodakaraensis KOD1
  misc_feature (321437)..(321437): n is a or c or g or t.
  misc_feature (52783)..(527833): n is a or c or g or t.
  misc_feature (527901)..(527901): n is a or c or g or t.
  misc_feature (527978)..(527978): n is a or c or g or t.
  misc_feature (960838)..(960839): n is a or c or g or t.
  misc_feature (960860)..(960861): n is a or c or g or t.
  misc_feature (960872)..(960873): n is a or c or g or t.
  misc_feature (960879)..(960879): n is a or c or g or t.
  misc_feature (960890)..(960890): n is a or c or g or t.
  misc_feature (1250239)..(1250239): n is a or c or g or t.
  misc_feature (1302432)..(1302434): n is a or c or g or t.
  misc_feature (1302471)..(1302471): n is a or c or g or t.
  misc_feature (1302488)..(1302488): n is a or c or g or t.
  misc_feature (1674836)..(1674836): n is a or c or g or t.
VSDMVQVIEWVNPGEDEIIWRYPNEVIKWGAQLVVHEYEVAVFMRDGKVYDVFGPGRHTLTTQNLPLLYKLVGGSNSPFKATVIFVSTKEFQGRYGGETQTRELAPIKYYGVYWFKVADPVQFLTEVVGGQSLYDTSDVTKFIRAYFNEGMMKHLSSYSIVDLFQNLDMVSTQVKVKLMEDFRRLGLELVDVKIEGVNTTDEWRQRLFWIMQTGNAQAVMQLDTAKQVAAELGKSGSASVGTGMVLIPQLMQPQAPAQPAQPNAGGGVPPAGYQNQPAQQQAQPQAQQQEICPYCGKPLPPGARFCPYCGHEIKRCPNGHIVPEGAKFCPVCGAKIE

SEQ ID NO: 2155 - protein, 82 aa, Thermococcus kodakaraensis KOD1
  misc_feature (321437)..(321437): n is a or c or g or t.
  misc_feature (52783)..(527833): n is a or c or g or t.
  misc_feature (527901)..(527901): n is a or c or g or t.
  misc_feature (527978)..(527978): n is a or c or g or t.
  misc_feature (960838)..(960839): n is a or c or g or t.
  misc_feature (960860)..(960861): n is a or c or g or t.
  misc_feature (960872)..(960873): n is a or c or g or t.
  misc_feature (960879)..(960879): n is a or c or g or t.
  misc_feature (960890)..(960890): n is a or c or g or t.
  misc_feature (1250239)..(1250239): n is a or c or g or t.
  misc_feature (1302432)..(1302434): n is a or c or g or t.
  misc_feature (1302471)..(1302471): n is a or c or g or t.
  misc_feature (1302488)..(1302488): n is a or c or g or t.
  misc_feature (1674836)..(1674836): n is a or c or g or t.
VLQEYISFGESMEVVVKRIDAQGRLHLPKELREKLGDEVIIVDLGDRVEVLPRRKANLKKFFDSVEVEELKEWEELKRELWE

SEQ ID NO: 2156 - protein, 202 aa, Thermococcus kodakaraensis KOD1
  misc_feature (321437)..(321437): n is a or c or g or t.
  misc_feature (52783)..(527833): n is a or c or g or t.
  misc_feature (527901)..(527901): n is a or c or g or t.
  misc_feature (527978)..(527978): n is a or c or g or t.
  misc_feature (960838)..(960839): n is a or c or g or t.
  misc_feature (960860)..(960861): n is a or c or g or t.
  misc_feature (960872)..(960873): n is a or c or g or t.
  misc_feature (960879)..(960879): n is a or c or g or t.
  misc_feature (960890)..(960890): n is a or c or g or t.
  misc_feature (1250239)..(1250239): n is a or c or g or t.
  misc_feature (1302432)..(1302434): n is a or c or g or t.
  misc_feature (1302471)..(1302471): n is a or c or g or t.
  misc_feature (1302488)..(1302488): n is a or c or g or t.
  misc_feature (1674836)..(1674836): n is a or c or g or t.
MLITFISRPLYHFMGGGMIKVAIIGAENVGKSTLMNALIGGKVSEVENLPGTTKGVIRRRFGKLKIPKGMKNPYGGADEFVLIDTAGLFDPERELRGKVLSEEKFREIINEITSADIIIHMVDATVGLHRGMEKLHHMLKFRYEKPIIVVINKIDLVPRERVEELREIIKKRLEQEPIALSLVTYEGFNELLERIAYMAQYV

SEQ ID NO: 2157 - protein, 366 aa, Thermococcus kodakaraensis KOD1
  misc_feature (321437)..(321437): n is a or c or g or t.
  misc_feature (52783)..(527833): n is a or c or g or t.
  misc_feature (527901)..(527901): n is a or c or g or t.
  misc_feature (527978)..(527978): n is a or c or g or t.
  misc_feature (960838)..(960839): n is a or c or g or t.
  misc_feature (960860)..(960861): n is a or c or g or t.
  misc_feature (960872)..(960873): n is a or c or g or t.
  misc_feature (960879)..(960879): n is a or c or g or t.
  misc_feature (960890)..(960890): n is a or c or g or t.
  misc_feature (1250239)..(1250239): n is a or c or g or t.
  misc_feature (1302432)..(1302434): n is a or c or g or t.
  misc_feature (1302471)..(1302471): n is a or c or g or t.
  misc_feature (1302488)..(1302488): n is a or c or g or t.
  misc_feature (1674836)..(1674836): n is a or c or g or t.
MYGVILGKNSELSRAEFYSFGRRFGLKVKSIEEEHNWIVFESKPSVERYFRWIGGSLKLVRIVGEGEEALEELEYSRLFTVSLYGKSDWKLWRKLGSEIKKRFKEEGSAKFFKPAKTYAMPAELILKGFPEVKDFVFLFREDGSFLVGETIRVTDPFELKKLDVERPVQKPILSIPPRLARIMVNLTEVRKGSFLDPFCGIGTVVQEFVLQGLTAYGSDRDEGQIRDAKKNLTWLRKEFRLKNSAHLEVCDARKLKKCFRQRFDAIVTEPYLGKPLKRHPSRGEAIKLANELDRFYYSVFESFADVLKRNGKVVFVFPAYKLSGGGIYRKERKWLVKLGFEVLGRYPDYEERHRVVRDIHVLRYRG

SEQ ID NO: 2158 - DNA, 4732 bp, Artificial Sequence
  Description of Artificial Sequence:pUDT1
cttccgcttcctcgctcactgactcgctgcgctcggtcgttcggctgcggcgagcggtatcagctcactcaaaggcggtaatacggttatccacagaatcaggggataacgcaggaaagaacatgtgagcaaaaggccagcaaaaggccaggaaccgtaaaaaggccgcgttgctggcgtttttccataggctccgcccccctgacgagcatcacaaaaatcgacgctcaagtcagaggtggcgaaacccgacaggactataaagataccaggcgtttccccctggaagctccctcgtgcgctctcctgttccgaccctgccgcttaccggatacctgtccgcctttctcccttcgggaagcgtggcgctttctcatagctcacgctgtaggtatctcagttcggtgtaggtcgttcgctccaagctgggctgtgtgcacgaaccccccgttcagcccgaccgctgcgccttatccggtaactatcgtcttgagtccaacccggtaagacacgacttatcgccactggcagcagccactggtaacaggattagcagagcgaggtatgtaggcggtgctacagagttcttgaagtggtggcctaactacggctacactagaaggacagtatttggtatctgcgctctgctgaagccagttaccttcggaaaaagagttggtagctcttgatccggcaaacaaaccaccgctggtagcggtggtttttttgtttgcaagcagcagattacgcgcagaaaaaaaggatctcaagaagatcctttgatcttttctacggggtctgacgctcagtggaacgaaaactcacgttaagggattttggtcatgagattatcaaaaaggatcttcacctagatccttttaaattaaaaatgaagttttaaatcaatctaaagtatatatgagtaaacttggtctgacagttaccaatgcttaatcagtgaggcacctatctcagcgatctgtctatttcgttcatccatagttgcctgactccccgtcgtgtagataactacgatacgggagggcttaccatctggccccagtgctgcaatgataccgcgagacccacgctcaccggctccagatttatcagcaataaaccagccagccggaagggccgagcgcagaagtggtcctgcaactttatccgcctccatccagtctattaattgttgccgggaagctagagtaagtagttcgccagttaatagtttgcgcaacgttgttgccattgctacaggcatcgtggtgtcacgctcgtcgtttggtatggcttcattcagctccggttcccaacgatcaaggcgagttacatgatcccccatgttgtgcaaaaaagcggttagctccttcggtcctccgatcgttgtcagaagtaagttggccgcagtgttatcactcatggttatggcagcactgcataattctcttactgtcatgccatccgtaagatgcttttctgtgactggtgagtactcaaccaagtcattctgagaatagtgtatgcggcgaccgagttgctcttgcccggcgtcaatacgggataataccgcgccacatagcagaactttaaaagtgctcatcattggaaaacgttcttcggggcgaaaactctcaaggatcttaccgctgttgagatccagttcgatgtaacccactcgtgcacccaactgatcttcagcatcttttactttcaccagcgtttctgggtgagcaaaaacaggaaggcaaaatgccgcaaaaaagggaataagggcgacacggaaatgttgaatactcatactcttcctttttcaatattattgaagcatttatcagggttattgtctcatgagcggatacatatttgaatgtatttagaaaaataaacaaataggggttccgcgcacatttccccgaaaagtgccacctgacgtctaagaaaccattattatcatgacattaacctataaaaataggcgtatcacgaggccctttcgtctcgcgcgtttcggtgatgacggtgaaaacctctgacacatgcagctcccggagacggtcacagcttgtctgtaagcggatgccgggagcagacaagcccgtcagggcgcgtcagcgggtgttggcgggtgtcggggctggcttaactatgcggcatcagagcagattgtactgagagtgcaccataaaattgtaaacgttaatattttgttaaaattcgcgttaaatttttgttaaatcagctcattttttaaccaataggccgaaatcggcaaaatcccttataaatcaaaagaatagcccgagatagggttgagtgttgttccagtttggaacaagagtccactattaaagaacgtggactccaacgtcaaagggcgaaaaaccgtctatcagggcgatggcccactacgtgaaccatcacccaaatcaagttttttggggtcgaggtgccgtaaagcactaaatcggaaccctaaagggagcccccgatttagagcttgacggggaaagccggcgaacgtggcgagaaaggaagggaagaaagcgaaaggagcgggcgctagggcgctggcaagtgtagcggtcacgctgcgcgtaaccaccacacccgccgcgcttaatgcgccgctacagggcgcgtactatggttgctttgacgtatgcggtgtgaaataccgcacagatgcgtaaggagaaaataccgcatcaggcgccattcgccattcaggctgcgcaactgttgggaagggcgatcggtgcgggcctcttcgctattacgccagctggcgaaagggggatgtgctgcaaggcgattaagttgggtaacgccagggttttcccagtcacgacgttgtaaaacgacggccagtgccaagcttgcatgcggtggcttcgttggctacgtctcctacgattcggtacactccatcatcggggggaagatcgaagagccctcggtcttcggctactacccctggaccttcatctacgaccactctaccggcgctctttccttcttttacctcagagaggctcctttcgaccccgaggccttagttgaaagggccaggagggaagagtcacggcttgaagacggcggttcggaggtcatatccaccgacgcgggcatggaagagttcgttgaaatcgtcagggctgggaaggagtacatctactcgggggacgtcttccaggtggttctgtcgcgcgagtacagggttagaacggatctcgatgccctcgaaatctacaagcggctcgtggagctcaacccctccccgtacaccttcatcctggagttcgagaagaccgtcgtaggggcctcacccgaaaccatgggttccgtcgaggggagaaccttcaagataaaccccatagcaggaacagcgccgaggggaaggacgggggaggaagaccgggagctggaaaaggccctactctccgacgagaaagagcgagctgagcacgtcatgctcgttgaccttgctagaaacgacgtcaggagggtttcaaagcccgggagcgttaggctaacccgcttcttcgacgtcctgaagtacagccacgtccagcacatagagagcgaggtggtcggtgaactcgatgaggggaaaaacgcgttcgacgccatggaggcggcttttccggcgggaacactaaccggagccccgaactgcagccgcaacgcgcattttgctcacccgaaaatttttaaatactaagggttaatttaatctcgagcgtttgagtccttctgacggctcttggagagggccgttaaaaaggtgatgcatatggaggagagcaggctcattctggcgctcgacgtttatgatagggagagggcacttgagatagcggagtgcacagcagattacctctgggcaattaaggtaaactggcccctcatcatcggttccggattgaagataatcaccgagctcaagcaggtcacagggcttccgataatagccgacctcaaactcgctgatatccccaacacgaacagactgatagcgagtaaagtattcgaggctggggcagactacataattgcccacggcttcgtaggcagggacagcgttgaggccgttatggagcttggaaaaacgatcatcgttgtcgagatgagccatcccggagctaaagagttcattcagcccgtcaccgacaagctgatcgaacttgcaaacgagctggaacccttcggcgtaatagctcctgcgaccaggccggagcgggtctcgtacatccgttcaaggctcgagagggggataaggattttgactcccggagtgggtgcccagggtgggaaagccagtgatgccatcaaggccggtgctgactacgtgatagtcgggcgctcgatctacggcagtaataacccgcgcgaggcagcaaggagactctatgaggaaattctggaggtggtttgatggagttgaaagtcaaacaccccctcaggactctagaggatccccgggtaccgagctcgaattcgtaatcatggtcatagctgtttcctgtgtgaaattgttatccgctcacaattccacacaacatacgagccggaagcataaagtgtaaagcctggggtgcctaatgagtgagctaactcacattaattgcgttgcgctcactgcccgctttccagtcgggaaacctgtcgtgccagctgcattaatgaatcggccaacgcgcggggagaggcggtttgcgtattgggcgct

SEQ ID NO: 2159 - DNA, 6012 bp, Artificial Sequence
  Description of Artificial Sequence:pUDT2
cttccgcttcctcgctcactgactcgctgcgctcggtcgttcggctgcggcgagcggtatcagctcactcaaaggcggtaatacggttatccacagaatcaggggataacgcaggaaagaacatgtgagcaaaaggccagcaaaaggccaggaaccgtaaaaaggccgcgttgctggcgtttttccataggctccgcccccctgacgagcatcacaaaaatcgacgctcaagtcagaggtggcgaaacccgacaggactataaagataccaggcgtttccccctggaagctccctcgtgcgctctcctgttccgaccctgccgcttaccggatacctgtccgcctttctcccttcgggaagcgtggcgctttctcatagctcacgctgtaggtatctcagttcggtgtaggtcgttcgctccaagctgggctgtgtgcacgaaccccccgttcagcccgaccgctgcgccttatccggtaactatcgtcttgagtccaacccggtaagacacgacttatcgccactggcagcagccactggtaacaggattagcagagcgaggtatgtaggcggtgctacagagttcttgaagtggtggcctaactacggctacactagaaggacagtatttggtatctgcgctctgctgaagccagttaccttcggaaaaagagttggtagctcttgatccggcaaacaaaccaccgctggtagcggtggtttttttgtttgcaagcagcagattacgcgcagaaaaaaaggatctcaagaagatcctttgatcttttctacggggtctgacgctcagtggaacgaaaactcacgttaagggattttggtcatgagattatcaaaaaggatcttcacctagatccttttaaattaaaaatgaagttttaaatcaatctaaagtatatatgagtaaacttggtctgacagttaccaatgcttaatcagtgaggcacctatctcagcgatctgtctatttcgttcatccatagttgcctgactccccgtcgtgtagataactacgatacgggagggcttaccatctggccccagtgctgcaatgataccgcgagacccacgctcaccggctccagatttatcagcaataaaccagccagccggaagggccgagcgcagaagtggtcctgcaactttatccgcctccatccagtctattaattgttgccgggaagctagagtaagtagttcgccagttaatagtttgcgcaacgttgttgccattgctacaggcatcgtggtgtcacgctcgtcgtttggtatggcttcattcagctccggttcccaacgatcaaggcgagttacatgatcccccatgttgtgcaaaaaagcggttagctccttcggtcctccgatcgttgtcagaagtaagttggccgcagtgttatcactcatggttatggcagcactgcataattctcttactgtcatgccatccgtaagatgcttttctgtgactggtgagtactcaaccaagtcattctgagaatagtgtatgcggcgaccgagttgctcttgcccggcgtcaatacgggataataccgcgccacatagcagaactttaaaagtgctcatcattggaaaacgttcttcggggcgaaaactctcaaggatcttaccgctgttgagatccagttcgatgtaacccactcgtgcacccaactgatcttcagcatcttttactttcaccagcgtttctgggtgagcaaaaacaggaaggcaaaatgccgcaaaaaagggaataagggcgacacggaaatgttgaatactcatactcttcctttttcaatattattgaagcatttatcagggttattgtctcatgagcggatacatatttgaatgtatttagaaaaataaacaaataggggttccgcgcacatttccccgaaaagtgccacctgacgtctaagaaaccattattatcatgacattaacctataaaaataggcgtatcacgaggccctttcgtctcgcgcgtttcggtgatgacggtgaaaacctctgacacatgcagctcccggagacggtcacagcttgtctgtaagcggatgccgggagcagacaagcccgtcagggcgcgtcagcgggtgttggcgggtgtcggggctggcttaactatgcggcatcagagcagattgtactgagagtgcaccataaaattgtaaacgttaatattttgttaaaattcgcgttaaatttttgttaaatcagctcattttttaaccaataggccgaaatcggcaaaatcccttataaatcaaaagaatagcccgagatagggttgagtgttgttccagtttggaacaagagtccactattaaagaacgtggactccaacgtcaaagggcgaaaaaccgtctatcagggcgatggcccactacgtgaaccatcacccaaatcaagttttttggggtcgaggtgccgtaaagcactaaatcggaaccctaaagggagcccccgatttagagcttgacggggaaagccggcgaacgtggcgagaaaggaagggaagaaagcgaaaggagcgggcgctagggcgctggcaagtgtagcggtcacgctgcgcgtaaccaccacacccgccgcgcttaatgcgccgctacagggcgcgtactatggttgctttgacgtatgcggtgtgaaataccgcacagatgcgtaaggagaaaataccgcatcaggcgccattcgccattcaggctgcgcaactgttgggaagggcgatcggtgcgggcctcttcgctattacgccagctggcgaaagggggatgtgctgcaaggcgattaagttgggtaacgccagggttttcccagtcacgacgttgtaaaacgacggccagtgccaagcttgcatgcctgcaggtcgaccgggtctggcgagggcaatgagggacagcgcagtcaagctcgacctcgggaaggtggccgatacagccgggacggggggagacggcagctcgaccataaacgtcagcacggcctcggctttgatactctcggccttcacgagggtcgctaaacacggaaacgtttccataacatcgaagagcggctcagccaacgtacttgaggcgcttggcttaaacatacgggtttccccggagagggccagggagatggtcgaaagcacgaacttcacgttcatcttcgctcccgcctatcacccggcactcagaccaataatgcccgtgagaaaggccctcgggataaagacagtcttcaacgtcatcgggccgcttgcgaatccagcggatccagcataccaggtagtcggagtcaactctccagagcttctggaacccgtggcagaggccctggagttccttggggttgagagggccctggttgtccacggttcgggcatggatgaggtgtccccacacagagagaccctcgtcctggaggttggcaatggagttgagaggtacacgctctcacctgaggacttcggaatcgagcctgtgaagcccctgccgtgctcctccccggaagagagcgccgcgaggataaaggcggttctagggggttcgggaaggcgggaggacagggacttcatcctcgtcaacgcttcggcggctctctacgcgtcaggggttgcggaggactttagggagggccttgagatggccagggaagccctgggccagggaatgcttgaaaaactggaggagatagcatgcctctcaaaaagctgaagcccgttgaccctttgaagctctacagcgcccttagagactttgggatgccattcatgctccgctctgccgagaaggactccaggaaggccagattcacctacatatcggccgagccggagttcgtcgtggaggtcggcgaggggactgagatcgacggggagcgagtttccgacgagaggaaccccctcagctggcgaaagggggatgtgctgcaaggcgattaagttgggtaacgccagggttttcccagtcacgacgttgtaaaacgacggccagtgccaagcttgcatgcctgcagccgcaacgcgcattttgctcacccgaaaatttttaaatactaagggttaatttaatctcgagcgtttgagtccttctgacggctcttggagagggccgttaaaaaggtgatgcatatggaggagagcaggctcattctggcgctcgacgtttatgatagggagagggcacttgagatagcggagtgcacagcagattacctctgggcaattaaggtaaactggcccctcatcatcggttccggattgaagataatcaccgagctcaagcaggtcacagggcttccgataatagccgacctcaaactcgctgatatccccaacacgaacagactgatagcgagtaaagtattcgaggctggggcagactacataattgcccacggcttcgtaggcagggacagcgttgaggccgttatggagcttggaaaaacgatcatcgttgtcgagatgagccatcccggagctaaagagttcattcagcccgtcaccgacaagctgatcgaacttgcaaacgagctggaacccttcggcgtaatagctcctgcgaccaggccggagcgggtctcgtacatccgttcaaggctcgagagggggataaggattttgactcccggagtgggtgcccagggtgggaaagccagtgatgccatcaaggccggtgctgactacgtgatagtcgggcgctcgatctacggcagtaataacccgcgcgaggcagcaaggagactctatgaggaaattctggaggtggtttgatggagttgaaagtcaaacaccccctcaggactctagaggatccccgggtaccgagctcgaattcgtaatcatggtcatagctgtttcctgtgtgaaattgttatccgctcacaattccacacaacatacgagccggaagcataaagtgtaaagcctggggtgcctaatgagtgagctaactcacattaattgcgttgcgctcactgcccgctttccagtcgggaaacctgtcgtgccagcaacccctccccgtacaccttcatcctggagttcgagaagaccgtcgtaggggcctcacccgaaaccatgggttccgtcgaggggagaaccttcaagataaaccccatagcaggaacagcgccgaggggaaggacgggggaggaagaccgggagctggaaaaggccctactctccgacgagaaagagcgagctgagcacgtcatgctcgttgaccttgctagaaacgacgtcaggagggtttcaaagcccgggagcgttaggctaacccgcttcttcgacgtcctgaagtacagccacgtccagcacatagagagcgaggtggtcggtgaactcgatgaggggaaaaacgcgttcgacgccatggaggcggcttttccggcgggaacactaaccggagccccgaagataagggcgatggagatcatagacgagctggagaggagcaggagaaaggtctacgggggagcagtgggttacttctccctcaccggggacgccgacatggcgatagcgataaggatggccgagatcgagggcaggaaagcgagcgttagggccggggcaggaatagtggcggattcagttccagagaaggagttcttcgagaccgagaacaaaatgagagcagttctgaaggcgctgggggtgagggaatgatagtcctcgtcaacaacagggactccttcgtctggaatttagccgagtacgcctccctcttcgacagagtgaaggtcgttccgaacactataaccgaattcgtaatcatggtcatagctgtttcctgtgtgaaattgttatccgctcacaattccacacaacatacgagccggaagcataaagtgtaaagcctggggtgcctaatgagtgagctaactcacattaattgcgttgcgctcactgcccgctttccagtcgggaaacctgtcgtgccagctgcattaatgaatcggccaacgcgcggggagaggcggtttgcgtattgggcgct

SEQ ID NO: 2160 - DNA, 33 bp, Artificial Sequence
  Description of Artificial Sequence:TK1-DUR
gggcatatggaggagagcaggctcattctggcg

SEQ ID NO: 2161 - DNA, 23 bp, Artificial Sequence
  Description of Artificial Sequence:TK1-DUF
ctgagggggtgtttgactttcaa

SEQ ID NO: 2162 - DNA, 38 bp, Artificial Sequence
  Description of Artificial Sequence:TK2-DPR
gggctgcagccgcaacgcgcattttgctcacccgaaaa

SEQ ID NO: 2163 - DNA, 39 bp, Artificial Sequence
  Description of Artificial Sequence:TK2-DPF
gggcatatgcatcacctttttaacggccctctccaagag

SEQ ID NO: 2164 - DNA, 37 bp, Artificial Sequence
  Description of Artificial Sequence:TK3-DTR
ggggcatgcggtggcttcgttggctacgtctcctacg

SEQ ID NO: 2165 - DNA, 37 bp, Artificial Sequence
  Description of Artificial Sequence:TK3-DTF
gggctgcagttcggggctccggttagtgttcccgccg

SEQ ID NO: 2166 - DNA, 35 bp, Artificial Sequence
  Description of Artificial Sequence:TK4-DT2R
ggggtcgaccgggtctggcgagggcaatgagggac

SEQ ID NO: 2167 - DNA, 38 bp, Artificial Sequence
  Description of Artificial Sequence: TK4-DT2F
ggggaattcggttatagtgttcggaacgaccttcactc
